(19) United States
(12) Patent Application Publication
(10) Pub. No.: US 2003/0082758 A1
(43) Pub. Date: May 1, 2003

(54) Nucleic acids, proteins, and antibodies

(75) Inventors: Craig A. Rosen, Laytonsville, MD (US); Steven M. Ruben, Olney, MD (US); Steven C. Barash, Rockville, MD (US)

Correspondence Address: HUMAN GENOME SCIENCES INC, 9410 KEY WEST AVENUE, ROCKVILLE, MD, 20850

(73) Assignee: Human Genome Sciences, Inc., Rockville, MD

(21) Appl. No.: 10/103,313

(22) Filed: Mar. 22, 2002

Related U.S. Application Data
(63) Continuation of application No. 09/764,854, filed on Jan. 17, 2001, now abandoned.
(60) Provisional application No. 60/179,065, filed on Jan. 31, 2000.
(60) Provisional application No. 60/180,628, filed on Feb. 4, 2000.
(60) Provisional application No. 60/214,886, filed on Jun. 28, 2000.
(60) Provisional application No. 60/217,487, filed on Jul. 11, 2000.
(60) Provisional application No. 60/225,758, filed on Aug. 14, 2000.
(60) Provisional application No. 60/220,963, filed on Jul. 26, 2000.
(60) Provisional application No. 60/217,496, filed on Jul. 11, 2000.
(60) Provisional application No. 60/225,447, filed on Aug. 14, 2000.
(60) Provisional application No. 60/218,290, filed on Jul. 14, 2000.
(60) Provisional application No. 60/225,757, filed on Aug. 14, 2000.
(60) Provisional application No. 60/226,868, filed on Aug. 22, 2000.
(60) Provisional application No. 60/216,647, filed on Jul. 7, 2000.
(60) Provisional application No. 60/225,267, filed on Aug. 14, 2000.
(60) Provisional application No. 60/216,880, filed on Jul. 7, 2000.
(60) Provisional application No. 60/225,270, filed on Aug. 14, 2000.
(60) Provisional application No. 60/251,869, filed on Dec. 8, 2000.
(60) Provisional application No. 60/235,834, filed on Sep. 27, 2000.
(60) Provisional application No. 60/234,274, filed on Sep. 21, 2000.
(60) Provisional application No. 60/234,223, filed on Sep. 21, 2000.
(60) Provisional application No. 60/228,924, filed on Aug. 30, 2000.
(60) Provisional application No. 60/224,518, filed on Aug. 14, 2000.
(60) Provisional application No. 60/236,369, filed on Sep. 29, 2000.
(60) Provisional application No. 60/224,519, filed on Aug. 14, 2000.
(60) Provisional application No. 60/220,964, filed on Jul. 26, 2000.
(60) Provisional application No. 60/241,809, filed on Oct. 20, 2000.
(60) Provisional application No. 60/249,299, filed on Nov. 17, 2000.
(60) Provisional application No. 60/236,327, filed on Sep. 29, 2000.
(60) Provisional application No. 60/241,785, filed on Oct. 20, 2000.
(60) Provisional application No. 60/244,617, filed on Nov. 1, 2000.
(60) Provisional application No. 60/225,268, filed on Aug. 14, 2000.
(60) Provisional application No. 60/236,368, filed on Sep. 29, 2000.
(60) Provisional application No. 60/251,856, filed on Dec. 8, 2000.
(60) Provisional application No. 60/251,868, filed on Dec. 8, 2000.
(60) Provisional application No. 60/229,344, filed on Sep. 1, 2000.
(60) Provisional application No. 60/234,997, filed on Sep. 25, 2000.
(60) Provisional application No. 60/229,343, filed on Sep. 1, 2000.
(60) Provisional application No. 60/229,345, filed on Sep. 1, 2000.
(60) Provisional application No. 60/229,287, filed on Sep. 1, 2000.
(60) Provisional application No. 60/229,513, filed on Sep. 5, 2000.
(60) Provisional application No. 60/231,413, filed on Sep. 8, 2000.
(60) Provisional application No. 60/229,509, filed on Sep. 5, 2000.
(60) Provisional application No. 60/236,367, filed on Sep. 29, 2000.
(60) Provisional application No. 60/237,039, filed on Oct. 2, 2000.
(60) Provisional application No. 60/237,038, filed on Oct. 2, 2000.
(60) Provisional application No. 60/236,370, filed on Sep. 29, 2000.
(60) Provisional application No. 60/236,802, filed on Oct. 2, 2000.
(60) Provisional application No. 60/237,037, filed on Oct. 2, 2000.
(60) Provisional application No. 60/237,040, filed on Oct. 2, 2000.
(60) Provisional application No. 60/240,960, filed on Oct. 20, 2000.
(60) Provisional application No. 60/239,935, filed on Oct. 13, 2000.
(60) Provisional application No. 60/239,937, filed on Oct. 13, 2000.
(60) Provisional application No. 60/241,787, filed on Oct. 20, 2000.
(60) Provisional application No. 60/246,474, filed on Nov. 8, 2000.
(60) Provisional application No. 60/246,532, filed on Nov. 8, 2000.
(60) Provisional application No. 60/249,216, filed on Nov. 17, 2000.
(60) Provisional application No. 60/249,210, filed on Nov. 17, 2000.
(60) Provisional application No. 60/226,681, filed on Aug. 22, 2000.
(60) Provisional application No. 60/225,759, filed on Aug. 14, 2000.
(60) Provisional application No. 60/225,213, filed on Aug. 14, 2000.
(60) Provisional application No. 60/227,182, filed on Aug. 22, 2000.
(60) Provisional application No. 60/225,214, filed on Aug. 14, 2000.
(60) Provisional application No. 60/235,836, filed on Sep. 27, 2000.
(60) Provisional application No. 60/230,438, filed on Sep. 6, 2000.
(60) Provisional application No. 60/215,135, filed on Jun. 30, 2000.
(60) Provisional application No. 60/225,266, filed on Aug. 14, 2000.
(60) Provisional application No. 60/249,218, filed on Nov. 17, 2000.
(60) Provisional application No. 60/249,208, filed on Nov. 17, 2000.
(60) Provisional application No. 60/249,213, filed on Nov. 17, 2000.
(60) Provisional application No. 60/249,212, filed on Nov. 17, 2000.
(60) Provisional application No. 60/249,207, filed on Nov. 17, 2000.
(60) Provisional application No. 60/249,245, filed on Nov. 17, 2000.
(60) Provisional application No. 60/249,244, filed on Nov. 17, 2000.
(60) Provisional application No. 60/249,217, filed on Nov. 17, 2000.
(60) Provisional application No. 60/249,211, filed on Nov. 17, 2000.
(60) Provisional application No. 60/249,215, filed on Nov. 17, 2000.
(60) Provisional application No. 60/249,264, filed on Nov. 17, 2000.
(60) Provisional application No. 60/249,214, filed on Nov. 17, 2000.
(60) Provisional application No. 60/249,297, filed on Nov. 17, 2000.
(60) Provisional application No. 60/232,400, filed on Sep. 14, 2000.
(60) Provisional application No. 60/231,242, filed on Sep. 8, 2000.
(60) Provisional application No. 60/232,081, filed on Sep. 8, 2000.
(60) Provisional application No. 60/232,080, filed on Sep. 8, 2000.
(60) Provisional application No. 60/231,414, filed on Sep. 8, 2000.
(60) Provisional application No. 60/231,244, filed on Sep. 8, 2000.
(60) Provisional application No. 60/233,064, filed on Sep. 14, 2000.
(60) Provisional application No. 60/233,063, filed on Sep. 14, 2000.
(60) Provisional application No. 60/232,397, filed on Sep. 14, 2000.
(60) Provisional application No. 60/232,399, filed on Sep. 14, 2000.
(60) Provisional application No. 60/232,401, filed on Sep. 14, 2000.
(60) Provisional application No. 60/241,808, filed on Oct. 20, 2000.
(60) Provisional application No. 60/241,826, filed on Oct. 20, 2000.
(60) Provisional application No. 60/241,786, filed on Oct. 20, 2000.
(60) Provisional application No. 60/241,221, filed on Oct. 20, 2000.
(60) Provisional application No. 60/246,475, filed on Nov. 8, 2000.
(60) Provisional application No. 60/231,243, filed on Sep. 8, 2000.
(60) Provisional application No. 60/233,065, filed on Sep. 14, 2000.
(60) Provisional application No. 60/232,398, filed on Sep. 14, 2000.
(60) Provisional application No. 60/234,998, filed on Sep. 25, 2000.
(60) Provisional application No. 60/246,477, filed on Nov. 8, 2000.
(60) Provisional application No. 60/246,528, filed on Nov. 8, 2000.
(60) Provisional application No. 60/246,525, filed on Nov. 8, 2000.
(60) Provisional application No. 60/246,476, filed on Nov. 8, 2000.
(60) Provisional application No. 60/246,526, filed on Nov. 8, 2000.
(60) Provisional application No. 60/249,209, filed on Nov. 17, 2000.
(60) Provisional application No. 60/246,527, filed on Nov. 8, 2000.
(60) Provisional application No. 60/246,523, filed on Nov. 8, 2000.
(60) Provisional application No. 60/246,524, filed on Nov. 8, 2000.
(60) Provisional application No. 60/246,478, filed on Nov. 8, 2000.
(60) Provisional application No. 60/246,609, filed on Nov. 8, 2000.
(60) Provisional application No. 60/246,613, filed on Nov. 8, 2000.
(60) Provisional application No. 60/249,300, filed on Nov. 17, 2000.
(60) Provisional application No. 60/249,265, filed on Nov. 17, 2000.
(60) Provisional application No. 60/246,610, filed on Nov. 8, 2000.
(60) Provisional application No. 60/246,611, filed on Nov. 8, 2000.
(60) Provisional application No. 60/230,437, filed on Sep. 6, 2000.
(60) Provisional application No. 60/251,990, filed on Dec. 8, 2000.
(60) Provisional application No. 60/251,988, filed on Dec. 5, 2000.
(60) Provisional application No. 60/251,030, filed on Dec. 5, 2000.
(60) Provisional application No. 60/251,479, filed on Dec. 6, 2000.
(60) Provisional application No. 60/256,719, filed on Dec. 5, 2000.
(60) Provisional application No. 60/250,160, filed on Dec. 1, 2000.
(60) Provisional application No. 60/251,989, filed on Dec. 8, 2000.
(60) Provisional application No. 60/250,391, filed on Dec. 1, 2000.
(60) Provisional application No. 60/254,097, filed on Dec. 11, 2000.
(60) Provisional application No. 60/231,968, filed on Sep. 12, 2000.
(60) Provisional application No. 60/226,279, filed on Aug. 18, 2000.
(60) Provisional application No. 60/186,350, filed on Mar. 2, 2000.
(60) Provisional application No. 60/184,664, filed on Feb. 24, 2000.
(60) Provisional application No. 60/189,874, filed on Mar. 16, 2000.
(60) Provisional application No. 60/198,123, filed on Apr. 18, 2000.
(60) Provisional application No. 60/227,009, filed on Aug. 23, 2000.
(60) Provisional application No. 60/235,484, filed on Sep. 26, 2000.
(60) Provisional application No. 60/190,076, filed on Mar. 17, 2000.
(60) Provisional application No. 60/209,467, filed on Jun. 7, 2000.
(60) Provisional application No. 60/205,515, filed on May 19, 2000.
(60) Provisional application No. 60/259,678, filed on Jan. 5, 2001.

(51) Int. Cl. C12Q 1/68; C07H 21/04; C12N 9/00; C12P 21/02; C12N 5/06

(52) U.S. Cl. 435/183; 435/6; 435/69.1; 435/320.1; 435/325; 536/23.2

(57) ABSTRACT

The present invention relates to novel proteins. More specifically, isolated nucleic acid molecules are provided encoding novel polypeptides. Novel polypeptides and antibodies that bind to these polypeptides are provided. Also provided are vectors, host cells, and recombinant and synthetic methods for producing human polynucleotides and/or polypeptides, and antibodies. The invention further relates to diagnostic and therapeutic methods useful for diagnosing, treating, preventing and/or prognosing disorders related to these novel polypeptides. The invention further relates to screening methods for identifying agonists and antagonists of polynucleotides and polypeptides of the invention. The present invention further relates to methods and/or compositions for inhibiting or enhancing the production and function of the polypeptides of the present invention.

### STATEMENT UNDER 37 C.F.R. § 1.77(b)(4)

[0001] This application refers to a “Sequence Listing” listed below, which is provided as an electronic document on two identical compact discs (CD-R), labeled “Copy 1” and “Copy 2.” These compact discs each contain the file “PJZ07C1_seqList.txt” (1,410,981 bytes, created on Mar. 20, 2002), which is hereby incorporated in its entirety herein.

[0002] The Sequence Listing may be viewed on an IBM-PC machine running the MS-Windows operating system.

### FIELD OF THE INVENTION

[0003] The present invention relates to novel proteins. More specifically, isolated nucleic acid molecules are provided encoding novel polypeptides. Novel polypeptides and antibodies that bind to these polypeptides are provided. Also provided are vectors, host cells, and recombinant and synthetic methods for producing human polynucleotides and/or polypeptides, and antibodies. The invention further relates to diagnostic and therapeutic methods useful for diagnosing, treating, preventing and/or prognosing disorders related to these novel polypeptides. The invention further relates to screening methods for identifying agonists and antagonists of polynucleotides and polypeptides of the invention. The present invention further relates to methods and/or compositions for inhibiting or enhancing the production and function of the polypeptides of the present invention.

### BACKGROUND OF THE INVENTION

[0004] Neoplastic disease (or cancer) is actually a diverse group of diseases sharing one characteristic in common; all neoplastic diseases (cancers) result from the uncontrolled proliferation of cells. The human body is composed of many different cell types, e.g. liver cells, muscle cells, brain cells, etc. Normally, these cells grow and divide to produce more cells only as the body needs them (e.g. to regenerate blood cells or replace epithelial cells lining the stomach). Sometimes, however, cells begin to divide unchecked even though new cells are not needed. These extra cells accumulate and form a mass of tissue, called a tumor. Although each of the over 200 cell types in the body can potentially become cancerous, some cell types become cancerous at relatively high rates while many other cell types rarely become cancerous.

[0005] Tumors are either benign or malignant. Benign tumors are not cancerous; they can usually be removed, they do not spread to other parts of the body and, they rarely threaten life. Malignant tumors, however, are cancerous. Cells in malignant tumors can invade and damage nearby or distant tissues and organs. The spread of cancerous cells is called metastasis. Malignant (or metastatic) cells can invade adjacent organs by proliferating directly from the primary tumor. Additionally, malignant cells can also metastasize to distant organs by breaking away from the primary tumor, entering the bloodstream or lymphatic system, and settling down in a new organ or tissue to produce a secondary tumor. The origin of secondary tumors is established by comparing cells comprising these tumors to cells in the original (primary) tumor.

[0006] In contrast to solid organ cancers (such as cancer in the liver, lung, and brain) cancer can also develop in blood-forming cells. These cancers are referred to as leukemias or lymphomas. Leukemia refers to cancer of blood forming cells such as red blood cells, platelets, and plasma cells. Lymphomas are a subset of leukemias, primarily involving white blood cells, in which the cancerous cells originated in, or are associated with, the lymph system and lymph organs (e.g. T-lymphocytes in the lymph nodes, spleen or thymus).

[0007] In 1999 over 1.1 million people were newly diagnosed with 23 different types of cancer. The vast majority of these cases (˜75%) involved cancers of the prostate, breast, lung, colon, or urinary tract, or non-Hodgkin's lymphoma. Among the most fatal cancers are pancreatic, liver, esophageal, lung, stomach, and brain cancers, having up to 96% mortality rates depending on the specific cancer. In all, some 23 different types of cancer are expected to kill over 86,000 people each year.

[0008] Most cancers are treated with one or a combination therapies consisting of surgery, radiation therapy, chemotherapy, hormone therapy, and/or biological therapy. These five therapeutic modes are either local or systemic treatment strategies. Local treatments affect cancer cells in the tumor and imediately adjacent areas (for example, surgical tumor removal is a local treatment as are most radiation treatments). In contrast, systemic treatments travel through the bloodstream, and reach cancer and other cells all over the body. Chemotherapy, hormone therapy, and biological therapy are examples of systemic treatments.

[0009] Whether systemic or local, it is often difficult or impossible to protect healthy cells from the harmful effects of cancer treatment; healthy cells and tissues are inevitably damaged in the process of treating the cancerous cells. Damage and disruption of the normal functioning of healthy cells and tissues often produces the undesirable side effects experienced by patients undergoing cancer treatment.

[0010] Recombinant polypeptides and polynucleotides derived from naturally occurring molecules, as well as antibodies specifically targeted to these molecules, used alone or in conjunction with other existing therapies, hold great promise as improved therapeutic agents for the treatment of neoplastic disorders. Currently, most biological therapy can be classified as immunotherapy because these treatments often use naturally occurring molecules to assist the body's immune system in fighting the disease or in protecting the body from side effects of other cancer treatment(s). Among the most commonly used compounds in biological therapies are proteins called cytokines (e.g. interferons, interleukins, and colony stimulating factors) and monoclonal antibodies (targeted to particular cancer cells). Side effects caused by these commonly used biological therapies range from flu-like symptoms (chills, fever, muscle aches, weakness, loss of appetite, nausea, vomiting, and diarrhea) to rashes, swelling, easy bruising, or bleeding.

[0011] The discovery of new human neoplastic disease associated polynucleotides, the polypeptides encoded by them, and antibodies that immunospecifically bind these polypeptides, satisfies a need in the art by providing new compositions which are useful in the diagnosis, treatment, prevention and/or prognosis of disorders involving neoplastic diseases.

### SUMMARY OF THE INVENTION

[0012] The present invention relates to novel proteins. More specifically, isolated nucleic acid molecules are provided encoding novel polypeptides. Novel polypeptides and antibodies that bind to these polypeptides are provided. Also provided are vectors, host cells, and recombinant and synthetic methods for producing human polynucleotides and/or polypeptides, and antibodies. The invention further relates to diagnostic and therapeutic methods useful for diagnosing, treating, preventing and/or prognosing disorders related to these novel polypeptides. The invention further relates to screening methods for identifying agonists and antagonists of polynucleotides and polypeptides of the invention. The present invention further relates to methods and/or compositions for inhibiting or enhancing the production and function of the polypeptides of the present invention.

### DETAILED DESCRIPTION

### TABLES

[0013] Table 1A summarizes some of the polynucleotides encompassed by the invention (including cDNA clones related to the sequences (Clone ID NO:Z), contig sequences (contig identifier (Contig ID:) and contig nucleotide sequence identifier (SEQ ID NO:X)) and further summarizes certain characteristics of these polynucleotides and the polypeptides encoded thereby. The first column provides the gene number in the application for each clone identifier. The second column provides a unique clone identifier, “Clone ID NO:Z”, for a cDNA clone related to each contig sequence disclosed in Table 1A. The third column provides a unique contig identifier, “Contig ID:” for each of the contig sequences disclosed in Table 1A. The fourth column provides the sequence identifier, “SEQ ID NO:X”, for each of the contig sequences disclosed in Table 1A. The fifth column, “ORF (From-To)”, provides the location (i.e., nucleotide position numbers) within the polynucleotide sequence of SEQ ID NO:X that delineate the preferred open reading frame (ORF) that encodes the amino acid sequence shown in the sequence listing and referenced in Table 1A as SEQ ID NO:Y (column 6). Column 7 lists residues comprising predicted epitopes contained in the polypeptides encoded by each of the preferred ORFs (SEQ ID NO:Y). Identification of potential immunogenic regions was performed according to the method of Jameson and Wolf (CABIOS, 4; 181-186 (1988)); specifically, the Genetics Computer Group (GCG) implementation of this algorithm, embodied in the program PEPTIDESTRUCTURE (Wisconsin Package v10.0, Genetics Computer Group (GCG), Madison, Wis.). This method returns a measure of the probability that a given residue is found on the surface of the protein. Regions where the antigenic index score is greater than 0.9 over at least 6 amino acids are indicated in Table 1A as “Predicted Epitopes”. In particular embodiments, polypeptides of the invention comprise, or alternatively consist of, one, two, three, four, five or more of the predicted epitopes described in Table 1A. It will be appreciated that depending on the analytical criteria used to predict antigenic determinants, the exact address of the determinant may vary slightly. Column 8, “Tissue Distribution” shows the expression profile of tissue, cells, and/or cell line libraries which express the polynucleotides of the invention. The first number in column 8 (preceding the colon), represents the tissue/cell source identifier code corresponding to the key provided in Table 4. Expression of these polynucleotides was not observed in the other tissues and/or cell libraries tested. For those identifier codes in which the first two letters are not “AR”, the second number in column 8 (following the colon), represents the number of times a sequence corresponding to the reference polynucleotide sequence (e.g., SEQ ID NO:X) was identified in the tissue/cell source. Those tissue/cell source identifier codes in which the first two letters are “AR” designate information generated using DNA array technology. Utilizing this technology, cDNAs were amplified by PCR and then transferred, in duplicate, onto the array. Gene expression was assayed through hybridization of first strand cDNA probes to the DNA array. cDNA probes were generated from total RNA extracted from a variety of different tissues and cell lines. Probe synthesis was performed in the presence of ³³P dCTP, using oligo(dT) to prime reverse transcription. After hybridization, high stringency washing conditions were employed to remove non-specific hybrids from the array. The remaining signal, emanating from each gene target, was measured using a Phosphorimager. Gene expression was reported as Phosphor Stimulating Luminescence (PSL) which reflects the level of phosphor signal generated from the probe hybridized to each of the gene targets represented on the array. A local background signal subtraction was performed before the total signal generated from each array was used to normalize gene expression between the different hybridizations. The value presented after “[array code]:” represents the mean of the duplicate values, following background subtraction and probe normalization. One of skill in the art could routinely use this information to identify normal and/or diseased tissue(s) which show a predominant expression pattern of the corresponding polynucleotide of the invention or to identify polynucleotides which show predominant and/or specific tissue and/or cell expression. Column 9 provides the chromosomal location of polynucleotides corresponding to SEQ ID NO:X. Chromosomal location was determined by finding exact matches to EST and cDNA sequences contained in the NCBI (National Center for Biotechnology Information) UniGene database. Given a presumptive chromosomal location, disease locus association was determined by comparison with the Morbid Map, derived from Online Mendelian Inheritance in Man (Online Mendelian Inheritance in Man, OMIM™. McKusick-Nathans Institute for Genetic Medicine, Johns Hopkins University (Baltimore, Md.) and National Center for Biotechnology Information, National Library of Medicine (Bethesda, Md.) 2000. World Wide Web URL: http://www.ncbi.nlm.nih.gov/omim/). If the putative chromosomal location of the Query overlaps with the chromosomal location of a Morbid Map entry, an OMIM identification number is disclosed in column 10 labeled “OMIM Disease Reference(s)”. A key to the OMIM reference identification numbers is provided in Table 5.

[0014] Table 1B summarizes additional polynucleotides encompassed by the invention (including cDNA clones related to the sequences (Clone ID NO:Z), contig sequences (contig identifier (Contig ID:) contig nucleotide sequence identifiers (SEQ ID NO:X)), and genomic sequences (SEQ ID NO:B). The first column provides a unique clone identifier, “Clone ID NO:Z”, for a cDNA clone related to each contig sequence. The second column provides the sequence identifier, “SEQ ID NO:X”, for each contig sequence. The third column provides a unique contig identifier, “Contig ID:” for each contig sequence. The fourth column, provides a BAC identifier “BAC ID NO:A” for the BAC clone referenced in the corresponding row of the table. The fifth column provides the nucleotide sequence identifier, “SEQ ID NO:B” for a fragment of the BAC clone identified in column four of the corresponding row of the table. The sixth column, “Exon From-To”, provides the location (i.e., nucleotide position numbers) within the polynucleotide sequence of SEQ ID NO:B which delineate certain polynucleotides of the invention that are also exemplary members of polynucleotide sequences that encode polypeptides of the invention (e.g., polypeptides containing amino acid sequences encoded by the polynucleotide sequences delineated in column six, and fragments and variants thereof).

[0015] Table 2 summarizes homology and features of some of the polypeptides of the invention. The first column provides a unique clone identifier, “Clone ID NO:Z”, corresponding to a cDNA clone disclosed in Table 1A. The second column provides the unique contig identifier, “Contig ID:” corresponding to contigs in Table 1A and allowing for correlation with the information in Table 1A. The third column provides the sequence identifier, “SEQ ID NO:X”, for the contig polynucleotide sequence. The fourth column provides the analysis method by which the homology/identity disclosed in the Table was determined. Comparisons were made between polypeptides encoded by the polynucleotides of the invention and either a non-redundant protein database (herein referred to as “NR”), or a database of protein families (herein referred to as “PFAM”) as further described below. The fifth column provides a description of the PFAM/NR hit having a significant match to a polypeptide of the invention. Column six provides the accession number of the PFAM/NR hit disclosed in the fifth column. Column seven, “Score/Percent Identity”, provides a quality score or the percent identity, of the hit disclosed in columns five and six. Columns 8 and 9, “NT From” and “NT To” respectively, delineate the polynucleotides in “SEQ ID NO:X” that encode a polypeptide having a significant match to the PFAM/NR database as disclosed in the fifth and sixth columns. In specific embodiments polypeptides of the invention comprise, or alternatively consist of, an amino acid sequence encoded by a polynucleotide in SEQ ID NO:X as delineated in columns 8 and 9, or fragments or variants thereof.

[0016] Table 3 provides polynucleotide sequences that may be disclaimed according to certain embodiments of the invention. The first column provides a unique clone identifier, “Clone ID”, for a cDNA clone related to contig sequences disclosed in Table 1A. The second column provides the sequence identifier, “SEQ ID NO:X”, for contig sequences disclosed in Table 1A. The third column provides the unique contig identifier, “Contig ID:”, for contigs disclosed in Table 1A. The fourth column provides a unique integer ‘a’ where ‘a’ is any integer between 1 and the final nucleotide minus 15 of SEQ ID NO:X, and the fifth column provides a unique integer ‘b’ where ‘b’ is any integer between 15 and the final nucleotide of SEQ ID NO:X, where both a and b correspond to the positions of nucleotide residues shown in SEQ ID NO:X, and where b is greater than or equal to a+14. For each of the polynucleotides shown as SEQ ID NO:X, the uniquely defined integers can be substituted into the general formula of a−b, and used to describe polynucleotides which may be preferably excluded from the invention. In certain embodiments, preferably excluded from the invention are at least one, two, three, four, five, ten, or more of the polynucleotide sequence(s) having the accession number(s) disclosed in the sixth column of this Table (including for example, published sequence in connection with a particular BAC clone). In further embodiments, preferably excluded from the invention are the specific polynucleotide sequence(s) contained in the clones corresponding to at least one, two, three, four, five, ten, or more of the available material having the accession numbers identified in the sixth column of this Table (including for example, the actual sequence contained in an identified BAC clone).

[0017] Table 4 provides a key to the tissue/cell source identifier code disclosed in Table 1A, column 8. Column 1 provides the tissue/cell source identifier code disclosed in Table 1A, Column 8. Columns 2-5 provide a description of the tissue or cell source. Codes corresponding to diseased tissues are indicated in column 6 with the word “disease”. The use of the word “disease” in column 6 is non-limiting. The tissue or cell source may be specific (e.g. a neoplasm), or may be disease-associated (e.g., a tissue sample from a normal portion of a diseased organ). Furthermore, tissues and/or cells lacking the “disease” designation may still be derived from sources directly or indirectly involved in a disease state or disorder, and therefore may have a further utility in that disease state or disorder. In numerous cases where the tissue/cell source is a library, column 7 identifies the vector used to generate the library.

[0018] Table 5 provides a key to the OMIM reference identification numbers disclosed in Table 1A, column 10. OMIM reference identification numbers (Column 1) were derived from Online Mendelian Inheritance in Man (Online Mendelian Inheritance in Man, OMIM. McKusick-Nathans Institute for Genetic Medicine, Johns Hopkins University (Baltimore, Md.) and National Center for Biotechnology Information, National Library of Medicine, (Bethesda, Md.) 2000. World Wide Web URL: http://www.ncbi.nlm.nih.gov/omim/). Column 2 provides diseases associated with the cytologic band disclosed in Table 1A, column 9, as determined using the Morbid Map database.

[0019] Table 6 summarizes ATCC Deposits, Deposit dates, and ATCC designation numbers of deposits made with the ATCC in connection with the present application.

[0020] Table 7 shows the cDNA libraries sequenced, and ATCC designation numbers and vector information relating to these cDNA libraries.

[0021] Table 8 provides a physical characterization of clones encompassed by the invention. The first column provides the unique clone identifier, “Clone ID NO:Z”, for certain cDNA clones of the invention, as described in Table 1A. The second column provides the size of the cDNA insert contained in the corresponding cDNA clone.

### DEFINITIONS

[0022] The following definitions are provided to facilitate understanding of certain terms used throughout this specification.

[0023] In the present invention, “isolated” refers to material removed from its original environment (e.g., the natural environment if it is naturally occurring), and thus is altered “by the hand of man” from its natural state. For example, an isolated polynucleotide could be part of a vector or a composition of matter, or could be contained within a cell, and still be “isolated” because that vector, composition of matter, or particular cell is not the original environment of the polynucleotide. The term “isolated” does not refer to genomic or cDNA libraries, whole cell total or mRNA preparations, genomic DNA preparations (including those separated by electrophoresis and transferred onto blots), sheared whole cell genomic DNA preparations or other compositions where the art demonstrates no distinguishing features of the polynucleotide/sequences of the present invention.

[0024] As used herein, a “polynucleotide” refers to a molecule having a nucleic acid sequence encoding SEQ ID NO:Y or a fragment or variant thereof; a nucleic acid sequence contained in SEQ ID NO:X (as described in column 3 of Table 1A) or the complement thereof; a cDNA sequence contained in Clone ID NO:Z (as described in column 2 of Table 1A and contained within a library deposited with the ATCC); a nucleotide sequence encoding the polypeptide encoded by a nucleotide sequence in SEQ ID NO:B as defined in column 6 of Table 1B or a fragment or variant thereof; or a nucleotide coding sequence in SEQ ID NO:B as defined in column 6 of Table 1B or the complement thereof. For example, the polynucleotide can contain the nucleotide sequence of the full length cDNA sequence, including the 5′ and 3′ untranslated sequences, the coding region, as well as fragments, epitopes, domains, and variants of the nucleic acid sequence. Moreover, as used herein, a “polypeptide” refers to a molecule having an amino acid sequence encoded by a polynucleotide of the invention as broadly defined (obviously excluding poly-Phenylalanine or poly-Lysine peptide sequences which result from translation of a polyA tail of a sequence corresponding to a cDNA).

[0025] In the present invention, “SEQ ID NO:X” was often generated by overlapping sequences contained in multiple clones (contig analysis). A representative clone containing all or most of the sequence for SEQ ID NO:X is deposited at Human Genome Sciences, Inc. (HGS) in a catalogued and archived library. As shown, for example, in column 2 of Table 1A, each clone is identified by a cDNA Clone ID (identifier generally referred to herein as Clone ID NO:Z). Each Clone ID is unique to an individual clone and the Clone ID is all the information needed to retrieve a given clone from the HGS library. Furthermore, certain clones disclosed in this application have been deposited with the ATCC on Oct. 5, 2000, having the ATCC designation numbers PTA 2574 and PTA 2575; and on Jan. 5, 2001, having the depositor reference numbers TS-1, TS-2, AC-1, and AC-2. In addition to the individual cDNA clone deposits, most of the cDNA libraries from which the clones were derived were deposited at the American Type Culture Collection (hereinafter “ATCC”). Table 7 provides a list of the deposited cDNA libraries. One can use the Clone ID NO:Z to determine the library source by reference to Tables 6 and 7. Table 7 lists the deposited cDNA libraries by name and links each library to an ATCC Deposit. Library names contain four characters, for example, “HTWE.” The name of a cDNA clone (Clone ID) isolated from that library begins with the same four characters, for example “HTWEP07”. As mentioned below, Table 1A correlates the Clone ID names with SEQ ID NO:X. Thus, starting with an SEQ ID NO:X, one can use Tables 1, 6 and 7 to determine the corresponding Clone ID, which library it came from and which ATCC deposit the library is contained in. Furthermore, it is possible to retrieve a given cDNA clone from the source library by techniques known in the art and described elsewhere herein. The ATCC is located at 10801 University Boulevard, Manassas, Va. 20110-2209, USA. The ATCC deposits were made pursuant to the terms of the Budapest Treaty on the international recognition of the deposit of microorganisms for the purposes of patent procedure.

[0026] In specific embodiments, the polynucleotides of the invention are at least 15, at least 30, at least 50, at least 100, at least 125, at least 500, or at least 1000 continuous nucleotides but are less than or equal to 300 kb, 200 kb, 100 kb, 50 kb, 15 kb, 10 kb, 7.5 kb, 5 kb, 2.5 kb, 2.0 kb, or 1 kb, in length. In a further embodiment, polynucleotides of the invention comprise a portion of the coding sequences, as disclosed herein, but do not comprise all or a portion of any intron. In another embodiment, the polynucleotides comprising coding sequences do not contain coding sequences of a genomic flanking gene (i.e., 5′ or 3′ to the gene of interest in the genome). In other embodiments, the polynucleotides of the invention do not contain the coding sequence of more than 1000, 500, 250, 100, 50, 25, 20, 15, 10, 5, 4, 3, 2, or 1 genomic flanking gene(s).

[0027] A “polynucleotide” of the present invention also includes those polynucleotides capable of hybridizing, under stringent hybridization conditions, to sequences contained in SEQ ID NO:X, or the complement thereof (e.g., the complement of any one, two, three, four, or more of the polynucleotide fragments described herein), the polynucleotide sequence delineated in columns 8 and 9 of Table 2 or the complement thereof, and/or cDNA sequences contained in Clone ID NO:Z (e.g., the complement of any one, two, three, four, or more of the polynucleotide fragments, or the cDNA clone within the pool of cDNA clones deposited with the ATCC, described herein), and/or the polynucleotide sequence delineated in column 6 of Table 1B or the complement thereof. “Stringent hybridization conditions” refers to an overnight incubation at 42 degree C. in a solution comprising 50% formamide, 5×SSC (750 mM NaCl, 75 mM trisodium citrate), 50 mM sodium phosphate (pH 7.6), 5×Denhardt's solution, 10% dextran sulfate, and 20 μg/ml denatured, sheared salmon sperm DNA, followed by washing the filters in 0.1×SSC at about 65 degree C.

[0028] Also contemplated are nucleic acid molecules that hybridize to the polynucleotides of the present invention at lower stringency hybridization conditions. Changes in the stringency of hybridization and signal detection are primarily accomplished through the manipulation of formamide concentration (lower percentages of formamide result in lowered stringency); salt conditions, or temperature. For example, lower stringency conditions include an overnight incubation at 37 degree C. in a solution comprising 6×SSPE (20×SSPE=3M NaCl; 0.2M NaH₂PO₄; 0.02M EDTA, pH 7.4), 0.5% SDS, 30% formamide, 100 ug/ml salmon sperm blocking DNA; followed by washes at 50 degree C. with 1×SSPE, 0.1% SDS. In addition, to achieve even lower stringency, washes performed following stringent hybridization can be done at higher salt concentrations (e.g. 5×SSC).

[0029] Note that variations in the above conditions may be accomplished through the inclusion and/or substitution of alternate blocking reagents used to suppress background in hybridization experiments. Typical blocking reagents include Denhardt's reagent, BLOTTO, heparin, denatured salmon sperm DNA, and commercially available proprietary formulations. The inclusion of specific blocking reagents may require modification of the hybridization conditions described above, due to problems with compatibility.

[0030] Of course, a polynucleotide which hybridizes only to polyA+ sequences (such as any 3′ terminal polyA+tract of a cDNA shown in the sequence listing), or to a complementary stretch of T (or U) residues, would not be included in the definition of “polynucleotide,” since such a polynucleotide would hybridize to any nucleic acid molecule containing a poly (A) stretch or the complement thereof (e.g., practically any double-stranded cDNA clone generated using oligo dT as a primer).

[0031] The polynucleotide of the present invention can be composed of any polyribonucleotide or polydeoxribonucleotide, which may be unmodified RNA or DNA or modified RNA or DNA. For example, polynucleotides can be composed of single- and double-stranded DNA, DNA that is a mixture of single- and double-stranded regions, single- and double-stranded RNA, and RNA that is mixture of single- and double-stranded regions, hybrid molecules comprising DNA and RNA that may be single-stranded or, more typically, double-stranded or a mixture of single- and double-stranded regions. In addition, the polynucleotide can be composed of triple-stranded regions comprising RNA or DNA or both RNA and DNA. A polynucleotide may also contain one or more modified bases or DNA or RNA backbones modified for stability or for other reasons. “Modified” bases include, for example, tritylated bases and unusual bases such as inosine. A variety of modifications can be made to DNA and RNA; thus, “polynucleotide” embraces chemically, enzymatically, or metabolically modified forms.

[0032] The polypeptide of the present invention can be composed of amino acids joined to each other by peptide bonds or modified peptide bonds, i.e., peptide isosteres, and may contain amino acids other than the 20 gene-encoded amino acids. The polypeptides may be modified by either natural processes, such as posttranslational processing, or by chemical modification techniques which are well known in the art. Such modifications are well described in basic texts and in more detailed monographs, as well as in a voluminous research literature. Modifications can occur anywhere in a polypeptide, including the peptide backbone, the amino acid side-chains and the amino or carboxyl termini. It will be appreciated that the same type of modification may be present in the same or varying degrees at several sites in a given polypeptide. Also, a given polypeptide may contain many types of modifications. Polypeptides may be branched, for example, as a result of ubiquitination, and they may be cyclic, with or without branching. Cyclic, branched, and branched cyclic polypeptides may result from posttranslation natural processes or may be made by synthetic methods. Modifications include acetylation, acylation, ADP-ribosylation, amidation, covalent attachment of flavin, covalent attachment of a heme moiety, covalent attachment of a nucleotide or nucleotide derivative, covalent attachment of a lipid or lipid derivative, covalent attachment of phosphotidylinositol, cross-linking, cyclization, disulfide bond formation, demethylation, formation of covalent cross-links, formation of cysteine, formation of pyroglutamate, formylation, gamma-carboxylation, glycosylation, GPI anchor formation, hydroxylation, iodination, methylation, myristoylation, oxidation, pegylation, proteolytic processing, phosphorylation, prenylation, racemization, selenoylation, sulfation, transfer-RNA mediated addition of amino acids to proteins such as arginylation, and ubiquitination. (See, for instance, PROTEINS—STRUCTURE AND MOLECULAR PROPERTIES, 2nd Ed., T. E. Creighton, W. H. Freeman and Company, New York (1993); POSTTRANSLATIONAL COVALENT MODIFICATION OF PROTEINS, B. C. Johnson, Ed., Academic Press, New York, pgs. 1-12 (1983); Seifter et al., Meth. Enzymol. 182:626-646 (1990); Rattan et al., Ann. N.Y. Acad. Sci. 663:48-62 (1992)).

[0033] “SEQ ID NO:X” refers to a polynucleotide sequence described, for example, in Tables 1Aor 2, while “SEQ ID NO:Y” refers to a polypeptide sequence described in column 6 of Table 1A. SEQ ID NO:X is identified by an integer specified in column 4 of Table 1A. The polypeptide sequence SEQ ID NO:Y is a translated open reading frame (ORF) encoded by polynucleotide SEQ ID NO:X. “Clone ID NO:Z” refers to a cDNA clone described in column 2 of Table 1A.

[0034] “A polypeptide having functional activity” refers to a polypeptide capable of displaying one or more known functional activities associated with a full-length (complete) protein. Such functional activities include, but are not limited to, biological activity, antigenicity [ability to bind (or compete with a polypeptide for binding) to an anti-polypeptide antibody], immunogenicity (ability to generate antibody which binds to a specific polypeptide of the invention), ability to form multimers with polypeptides of the invention, and ability to bind to a receptor or ligand for a polypeptide.

[0035] The polypeptides of the invention can be assayed for functional activity (e.g. biological activity) using or routinely modifying assays known in the art, as well as assays described herein. Specifically, one of skill in the art may routinely assay neoplastic disease associated polypeptides (including fragments and variants) of the invention for activity using assays as described in Examples 21-62 and 65.

[0036] “A polypeptide having biological activity” refers to a polypeptide exhibiting activity similar to, but not necessarily identical to, an activity of a polypeptide of the present invention, including mature forms, as measured in a particular biological assay, with or without dose dependency. In the case where dose dependency does exist, it need not be identical to that of the polypeptide, but rather substantially similar to the dose-dependence in a given activity as compared to the polypeptide of the present invention (i.e., the candidate polypeptide will exhibit greater activity or not more than about 25-fold less and, preferably, not more than about tenfold less activity, and most preferably, not more than about three-fold less avtivity relative to the polypeptide of the present invention).

[0037] Table 1A summarizes some of the polynucleotides encompassed by the invention (including contig sequences (SEQ ID NO:X) and clones (Clone ID NO:Z) and further summarizes certain characteristics of these polynucleotides and the polypeptides encoded thereby.

TABLE 1A
Polynucleotides and Polypeptides of the Invention

| | | | | | AA | | Tissue Distribution | | |
|---|---|---|---|---|---|---|---|---|---|
| | | | | | SEQ | | Library code: count | | OMIM |
| Gene | Clone ID | Contig | SEQ ID | ORF | ID | | (see Table IV for | Cytologic | Disease |
| No: | NO: Z | ID: | NO: X | (From-To) | NO: Y | Predicted Epitopes | Library Codes) | Band | Reference(s): |
| 1 | HAJAU21 | 1007572 | 11 | 3-638 | 295 | Arg-25 to Arg-34, | AR089: 2, AR061: 0, | | |
| | | | | | | Ser-47 to Cys-57, | L0769: 2, S0420: 1, | | |
| | | | | | | Lys-88 to Ile-94, | H0271: 1, H0561: 1 and | | |
| | | | | | | Lys-118 to Ser-124. | H0647: 1. | | |
| | | 670606 | 182 | 2-364 | 466 | | | | |
| 2 | HMSKF13 | 708207 | 12 | 2-400 | 296 | Arg-1 to Leu-7. | S0002: 1, H0134: 1 and | | |
| | | | | | | | L0596: 1. | | |
| 3 | HHPFV44 | 1121866 | 13 | 194-484 | 297 | Arg-71 to Gln-76. | AR061: 10, AR089: 5 | | |
| | | | | | | | H0638: 1, H0051: 1, | | |
| | | | | | | | L0438: 1, H0539: 1, | | |
| | | | | | | | L0748: 1 and H0595: 1. | | |
| | | 715770 | 183 | 191-481 | 467 | Arg-71 to Gln-76. | | | |
| 4 | HLHCT68 | 764745 | 14 | 44-217 | 298 | | AR061: 7, AR089: 6 | | |
| | | | | | | | L0748: 2 and H0024: 1. | | |
| 5 | HTLAQ18 | 811792 | 15 | 2-493 | 299 | Ala-1 to Glu-11. | AR061: 11, AR089: 6 | | |
| | | | | | | | L0779: 3, L0758: 3, | | |
| | | | | | | | H0618: 2, H0253: 1, | | |
| | | | | | | | H0009: 1 and H0012: 1. | | |
| 6 | HE6FD03 | 1153880 | 16 | 1-657 | 300 | Arg-1 to Glu-15, | AR089: 1, AR061: 0 | | |
| | | | | | | Asp-32 to Lys-37, | H0046: 1, H0674: 1, | | |
| | | | | | | Glu-70 to Phe-78, | H0100: 1, L0774: 1, | | |
| | | | | | | Gln-119 to Glu-130, | L0659: 1, L0783: 1, | | |
| | | | | | | Met-151 to Asp-158, | L0438: 1, H0659: 1, | | |
| | | | | | | Ala-168 to Pro-173, | L0741: 1, L0747: 1, | | |
| | | | | | | Leu-181 to Lys-200. | L0786: 1, L0777: 1 and | | |
| | | | | | | | L0758: 1. | | |
| | | 859840 | 184 | 82-762 | 468 | Pro-35 to Ser-43, | | | |
| | | | | | | Glu-61 to Phe-69, | | | |
| | | | | | | Gln-110 to Glu-120. | | | |
| 7 | HEQAY32 | 869178 | 17 | 604-924 | 301 | Pro-23 to Ala-30, | AR089: 2, AR061: 0 | | |
| | | | | | | Arg-63 to Pro-68, | L0438: 6, L0439: 5, | | |
| | | | | | | Gly-80 to Trp-85, | H0052: 3, L0743: 3, | | |
| | | | | | | Asn-92 to Gly-101. | L0731: 3, H0265: 2, | | |
| | | | | | | | H0617: 2, H0634: 2, | | |
| | | | | | | | L0769: 2, L0766: 2, | | |
| | | | | | | | L0381: 2, L0751: 2, | | |
| | | | | | | | L0749: 2, L0758: 2, | | |
| | | | | | | | S0282: 1, S0356: 1, | | |
| | | | | | | | H0675: 1, S0132: 1, | | |
| | | | | | | | H0645: 1, S0222: 1, | | |
| | | | | | | | H0438: 1, T0082: 1, | | |
| | | | | | | | H0194: 1, H0544: 1, | | |
| | | | | | | | H0178: 1, H0355: 1, | | |
| | | | | | | | H0428: 1, H0181: 1, | | |
| | | | | | | | H0361: 1, H0038: 1, | | |
| | | | | | | | H0040: 1, H0616: 1, | | |
| | | | | | | | H0063: 1, H0087: 1, | | |
| | | | | | | | T0067: 1, H0059: 1, | | |
| | | | | | | | H0649: 1, S0002: 1, | | |
| | | | | | | | H0529: 1, L0535: 1, | | |
| | | | | | | | L0761: 1, L0646: 1, | | |
| | | | | | | | L0771: 1, L0767: 1, | | |
| | | | | | | | L0806: 1, L0653: 1, | | |
| | | | | | | | L0776: 1, L0659: 1, | | |
| | | | | | | | L0789: 1, L0663: 1, | | |
| | | | | | | | H0144: 1, L0565: 1, | | |
| | | | | | | | H0690: 1, H0682: 1, | | |
| | | | | | | | H0696: 1, H0436: 1, | | |
| | | | | | | | S0028: 1, L0741: 1, | | |
| | | | | | | | L0759: 1, H0667: 1, | | |
| | | | | | | | S0276: 1, H0542: 1 and | | |
| | | | | | | | H0423: 1. | | |
| 8 | HSSJM44 | 871067 | 18 | 406-960 | 302 | Cys-1 to His-7. | AR089: 1, AR061: 1 | | |
| | | | | | | | L0439: 5, H0620: 3, | | |
| | | | | | | | L0769: 3, H0556: 2, | | |
| | | | | | | | H0012: 2, H0024: 2, | | |
| | | | | | | | S0051: 2, H0100: 2, | | |
| | | | | | | | L0770: 2, L0774: 2, | | |
| | | | | | | | L0438: 2, L0751: 2, | | |
| | | | | | | | L0779: 2, S0444: 1, | | |
| | | | | | | | H0550: 1, H0013: 1, | | |
| | | | | | | | H0575: 1, S0010: 1, | | |
| | | | | | | | H0421: 1, H0052: 1, | | |
| | | | | | | | T0110: 1, H0545: 1, | | |
| | | | | | | | H0009: 1, H0050: 1, | | |
| | | | | | | | H0083: 1, H0604: 1, | | |
| | | | | | | | S0036: 1, H0135: 1, | | |
| | | | | | | | H0038: 1, H0551: 1, | | |
| | | | | | | | H0264: 1, H0059: 1, | | |
| | | | | | | | L0564: 1, L0637: 1, | | |
| | | | | | | | L0772: 1, L0771: 1, | | |
| | | | | | | | L0499: 1, L0806: 1, | | |
| | | | | | | | H0547: 1, S0152: 1, | | |
| | | | | | | | H0555: 1. L0747: 1, | | |
| | | | | | | | L0777: 1, L0755: 1, | | |
| | | | | | | | L0758: 1, L0592: 1, | | |
| | | | | | | | H0423: 1 and H0352: 1. | | |
| 9 | HOFMT55 | 1083824 | 19 | 87-590 | 303 | Val-17 to Glu-24, | AR050: 84, AR054: | | |
| | | | | | | Pro-76 to Glu-86, | 73, AR051: 55, AR089: | | |
| | | | | | | Pro-100 to Thr-111, | 21, AR061: 8 | | |
| | | | | | | Ile-134 to Arg-142. | H0415: 1 | | |
| | | 888552 | 185 | 87-239 | 469 | Val-17 to Glu-24. | | | |
| 10 | HYAAU65 | 909956 | 20 | 2-580 | 304 | Gln-68 to Ser-78, | AR089: 2, AR061: 1 | | |
| | | | | | | Thr-93 to Ser-101, | L0748: 2 and H0583: 1. | | |
| | | | | | | Pro-119 to Ala-130. | | | |
| 11 | HAHEF22 | 910996 | 21 | 3-839 | 305 | Lys-51 to Gly-58, | AR089: 16, AR061: 8 | | |
| | | | | | | Asp-67 to Glu-73. | L0803: 4, L0794: 3, | | |
| | | | | | | | L0747: 3, H0599: 2, | | |
| | | | | | | | L0659: 2, L0789: 2, | | |
| | | | | | | | S0364: 1, L0804: 1, | | |
| | | | | | | | H0539: 1, L0720: 1 and | | |
| | | | | | | | S0031: 1. | | |
| 12 | HPDVO67 | 1173157 | 22 | 3-1004 | 306 | His-1 to Asp-9, | AR089: 2, AR061: 2 | | |
| | | | | | | Thr-14 to Glu-23, | L0751: 10, L0666: 4, | | |
| | | | | | | Val-64 to Pro-70, | L0743: 3, H0253: 2, | | |
| | | | | | | Ala-131 to Leu-139, | H0622: 2, H0670: 2, | | |
| | | | | | | Gln-144 to Ser-150, | L0779: 2, H0685: 1, | | |
| | | | | | | Arg-176 to Pro-182, | H0181: 1, S0382: 1, | | |
| | | | | | | Ser-216 to Gly-228, | L0372: 1, L0646: 1, | | |
| | | | | | | Thr-232 to Pro-253, | L0773: 1, L0767: 1 | | |
| | | | | | | Ser-260 to Arg-277, | L0768: 1, L0657: 1, | | |
| | | | | | | Val-286 to Lys-309, | L0665: 1, S0374: 1, | | |
| | | | | | | Ala-318 to Asp-327. | H0658: 1, L0749: 1, | | |
| | | | | | | | L0777: 1, L0758: 1 and | | |
| | | | | | | | L0593: 1. | | |
| | | 911405 | 186 | 1-645 | 470 | Glu-1 to Asp-6, | | | |
| | | | | | | Thr-11 to Glu-20, | | | |
| | | | | | | Val-61 to Pro-67, | | | |
| | | | | | | Ala-128 to Leu-136, | | | |
| | | | | | | Gln-141 to Ser-147, | | | |
| | | | | | | Arg-173 to Pro-179. | | | |
| 13 | HFKKS58 | 1152246 | 23 | 368-1156 | 307 | Arg-1 to Asn-6, | AR089: 1, AR061: 1 | | |
| | | | | | | Thr-91 to Arg-97, | H0638: 2, L0665: 2, | | |
| | | | | | | Gln-145 to Leu-154, | L0747: 2, L0759: 2, | | |
| | | | | | | Arg-162 to Asp-169, | H0170: 1, H0686: 1, | | |
| | | | | | | Arg-235 to Lys-242, | H0671: 1, H0587: 1, | | |
| | | | | | | Arg-248 to Lys-263. | L0622: 1, L0471: 1, | | |
| | | | | | | | H0620: 1, S0250: 1, | | |
| | | | | | | | T0006: 1, H0553: 1, | | |
| | | | | | | | H0673: 1, H0169: 1, | | |
| | | | | | | | H0551: 1, T0067: 1, | | |
| | | | | | | | H0413: 1, H0560: 1, | | |
| | | | | | | | H0538: 1, L0598: 1, | | |
| | | | | | | | L0520: 1, L0764: 1, | | |
| | | | | | | | L0766: 1, L0649: 1, | | |
| | | | | | | | L0375: 1, L0666: 1, | | |
| | | | | | | | L0663: 1, L0664: 1, | | |
| | | | | | | | H0144: 1, H0693: 1, | | |
| | | | | | | | H0659: 1, S0027: 1, | | |
| | | | | | | | L0749: 1, L0756: 1, | | |
| | | | | | | | L0777: 1, L0594: 1, | | |
| | | | | | | | S0276: 1, H0422: 1 and | | |
| | | | | | | | H0352: 1. | | |
| | | 914398 | 187 | 2-1135 | 471 | Gln-93 to Gln-100, | | | |
| | | | | | | Thr-206 to Arg-212, | | | |
| | | | | | | Gln-260 to Leu-269, | | | |
| | | | | | | Arg-277 to Asp-284, | | | |
| | | | | | | Arg-350 to Lys-357, | | | |
| | | | | | | Arg-363 to Lys-378. | | | |
| 14 | HTFBE02 | 1199605 | 24 | 2-751 | 308 | Asp-33 to Leu-40, | AR089: 1, AR061: 0 | | |
| | | | | | | Asp-57 to Cys-62, | L0439: 2, L0021: 1, | | |
| | | | | | | Gln-92 to Lys-97, | H0372: 1, L0769: 1, | | |
| | | | | | | Phe-104 to Ser-109, | L0649: 1, L0748: 1, | | |
| | | | | | | Ala-117 to Lys-122, | L0485: 1, L0604: 1 and | | |
| | | | | | | Pro-186 toThr-191. | L0361: 1. | | |
| | | 920507 | 188 | 1-363 | 472 | Asp-28 to Leu-35, | | | |
| | | | | | | Asp-52 to Cys-57. | | | |
| 15 | HCEOR02 | 921110 | 25 | 26-559 | 309 | Glu-1 to Glu-13. | AR061: 13, AR089: 6 | | |
| | | | | | | | H0052: 2, L0769: 2, | | |
| | | | | | | | H0556: 1, S0282: 1, | | |
| | | | | | | | T0082: 1 and L0790: 1. | | |
| 16 | HLMDO95 | 928344 | 26 | 88-435 | 310 | | AR089: 27, AR061: 11 | | |
| | | | | | | | H0271: 3, H0250: 2, | | |
| | | | | | | | H0635: 2, S0216: 2, | | |
| | | | | | | | H0254: 1, H0638: 1, | | |
| | | | | | | | H0069: 1, H0416: 1, | | |
| | | | | | | | H0090: 1, L0761: 1, | | |
| | | | | | | | L0800: 1, L0776: 1, | | |
| | | | | | | | L0789: 1 and S0052: 1. | | |
| 17 | HCEMY90 | 932927 | 27 | 49-606 | 311 | | AR089: 0, AR061: 0 | | |
| | | | | | | | H0090: 2, H0052: 1 | | |
| | | | | | | | and L0439: 1. | | |
| 18 | HBGQN46 | 945370 | 28 | 99-683 | 312 | Arg-25 to Ala-32, | AR089: 1, AR061: 0 | | |
| | | | | | | Ala-54 to Tyr-59. | H0617: 2, L0794: 2, | | |
| | | | | | | | L0766: 2, L0806: 2, | | |
| | | | | | | | L0777: 2, H0587: 1, | | |
| | | | | | | | L0767: 1, L0375: 1, | | |
| | | | | | | | L0790: 1, L0792: 1, | | |
| | | | | | | | L0743: 1, L0779: 1 and | | |
| | | | | | | | L0780: 1. | | |
| 19 | HTEPK69 | 951188 | 29 | 2-1171 | 313 | His-1 to Asp-6, | AR061: 5, AR089: 3 | | |
| | | | | | | Pro-9 to Ala-22, | L0794: 6, L0766: 5, | | |
| | | | | | | Ala-24 to Ser-34, | L0803: 5, L0752: 5, | | |
| | | | | | | Leu-42 to Asn-53, | L0758: 5, H0038: 3, | | |
| | | | | | | Leu-65 to Ser-71, | H0616: 3, S0002: 3, | | |
| | | | | | | Asp-86 to Asp-92, | L0774: 3, L0663: 3, | | |
| | | | | | | Thr-96 to Ala-104, | S0126: 3, L0600: 3, | | |
| | | | | | | Pro-114 to Gln-124, | H0657: 2, S0418: 2, | | |
| | | | | | | Thr-132 to Glu-148, | H0442: 2, H0581: 2, | | |
| | | | | | | Leu-152 to Pro-157, | L0483: 2, H0031: 2, | | |
| | | | | | | Pro-166 to Leu-181, | H0553: 2, S0344: 2, | | |
| | | | | | | Glu-199 to Glu-209, | L0761: 2, L0804: 2, | | |
| | | | | | | Pro-242 to Ile-247, | L0655: 2, L0438: 2, | | |
| | | | | | | Arg-264 to Ile-270, | H0682: 2, L0602: 2, | | |
| | | | | | | Phe-284 to Pro-294, | L0748: 2, L0439: 2, | | |
| | | | | | | Arg-384 to Asp-390. | L0754: 2, L0749: 2, | | |
| | | | | | | | L0777: 2, L0587: 2, | | |
| | | | | | | | S0026: 2, H0265: 1, | | |
| | | | | | | | S0040: 1, T0049: 1, | | |
| | | | | | | | H0583: 1, H0662: 1, | | |
| | | | | | | | S0420: 1, S0358: 1, | | |
| | | | | | | | S0045: 1, H0550: 1, | | |
| | | | | | | | H0431: 1, H0453: 1, | | |
| | | | | | | | H0370: 1, H0497: 1, | | |
| | | | | | | | H0574: 1, H0485: 1, | | |
| | | | | | | | T0060: 1, H0013: 1, | | |
| | | | | | | | T0082: 1, H0253: 1, | | |
| | | | | | | | S0346: 1, H0318: 1, | | |
| | | | | | | | H0196: 1, H0052: 1, | | |
| | | | | | | | L0118: 1, H0012: 1, | | |
| | | | | | | | H0017: 1, T0006: 1, | | |
| | | | | | | | H0644: 1, H0400: 1, | | |
| | | | | | | | H0063: 1, T0067: 1, | | |
| | | | | | | | H0264: 1, H0488: 1, | | |
| | | | | | | | H0623: 1, H0494: 1, | | |
| | | | | | | | S0016: 1, H0561: 1, | | |
| | | | | | | | S0142: 1, L0763: 1, | | |
| | | | | | | | L0643: 1, L0662: 1, | | |
| | | | | | | | L0499: 1, L0651: 1, | | |
| | | | | | | | L0378: 1, L0806: 1, | | |
| | | | | | | | L0607: 1, L0659: 1, | | |
| | | | | | | | L0783: 1, L0664: 1, | | |
| | | | | | | | H0547: 1, L0747: 1, | | |
| | | | | | | | H0445: 1, L0592: 1, | | |
| | | | | | | | L0604: 1, L0595: 1, | | |
| | | | | | | | L0601: 1, H0543: 1, | | |
| | | | | | | | H0423: 1 and H0422: 1. | | |
| 20 | HRODF07 | 952426 | 30 | 31-195 | 314 | | AR061: 5, AR089: 4 | | |
| | | | | | | | S0328: 7, S0330: 7, | | |
| | | | | | | | L0648: 6, L0549: 5, | | |
| | | | | | | | H0329: 1, H0039: 1, | | |
| | | | | | | | H0598: 1, S0352: 1, | | |
| | | | | | | | L0551: 1, S0432: 1 and | | |
| | | | | | | | L0755: 1. | | |
| 21 | HUJDC24 | 953517 | 31 | 71-1099 | 315 | Arg-98 to Pro-103, | AR061: 0, AR089: 0 | | |
| | | | | | | His-120 to Asp-125, | | | |
| | | | | | | Pro-248 to Asn-269, | | | |
| | | | | | | Glu-319 to Asp-343. | | | |
| 22 | HNHCI32 | 861673 | 32 | 183-593 | 316 | Lys-17 to Thr-23, | AR051: 23, AR050: | | |
| | | | | | | His-95 to Thr-101. | 14, AR061: 10, AR054: 4, | | |
| | | | | | | | AR089: 3 | | |
| | | | | | | | S0053: 1 | | |
| | | 956105 | 189 | 963-553 | 473 | Lys-17 to Thr-23, | | | |
| | | | | | | His-95 to Thr-101. | | | |
| 23 | HUVDR03 | 1212685 | 33 | 3-752 | 317 | Leu-17 to Pro-24, | AR054: 77, AR051: 72, | | |
| | | | | | | Pro-30 to Lys-41, | AR050: 69, AR089: 5, | | |
| | | | | | | Asn-75 to Phe-80, | AR061: 3 | | |
| | | | | | | Arg-92 to Leu-130, | L0747: 12, L0766: 10, | | |
| | | | | | | Gly-135 to Asp-181, | H0683: 9, L0776: 7, | | |
| | | | | | | Glu-209 to His-217. | H0521: 6, L0764: 4, | | |
| | | | | | | | L0439: 4, L0731: 4, | | |
| | | | | | | | H0624: 3, S0222: 3, | | |
| | | | | | | | H0457: 3, H0051: 3, | | |
| | | | | | | | L0770: 3, L0769: 3, | | |
| | | | | | | | L0790: 3, L0666: 3, | | |
| | | | | | | | L0664: 3, H0547: 3, | | |
| | | | | | | | L0750: 3, L0757: 3, | | |
| | | | | | | | L0759: 3, H0050: 2, | | |
| | | | | | | | H0056: 2, S0210: 2, | | |
| | | | | | | | L0662: 2, L0774: 2, | | |
| | | | | | | | L0519: 2, L0665: 2, | | |
| | | | | | | | H0519: 2, L0748: 2, | | |
| | | | | | | | L0751: 2, S0242: 2, | | |
| | | | | | | | H0556: 1, H0657: 1, | | |
| | | | | | | | H0341: 1, H0484: 1, | | |
| | | | | | | | H0125: 1, S0418: 1, | | |
| | | | | | | | S0354: 1, S0300: 1, | | |
| | | | | | | | S0278: 1, H0370: 1, | | |
| | | | | | | | H0392: 1, H0438: 1, | | |
| | | | | | | | H0600: 1, H0592: 1, | | |
| | | | | | | | T0039: 1, H0250: 1, | | |
| | | | | | | | H0427: 1, H0042: 1, | | |
| | | | | | | | H0575: 1, H0004: 1, | | |
| | | | | | | | H0581: 1, H0421: 1, | | |
| | | | | | | | H0012: 1, H0083: 1, | | |
| | | | | | | | H0408: 1, H0355: 1, | | |
| | | | | | | | H0266: 1, H0271: 1, | | |
| | | | | | | | H0622: 1, H0169: 1, | | |
| | | | | | | | H0135: 1, H0264: 1, | | |
| | | | | | | | H0272: 1, H0488: 1, | | |
| | | | | | | | H0412: 1, H0623: 1, | | |
| | | | | | | | H0059: 1, H0625: 1, | | |
| | | | | | | | H0641: 1, S0426: 1, | | |
| | | | | | | | L0761: 1, L0646: 1, | | |
| | | | | | | | L0773: 1, L0803: 1, | | |
| | | | | | | | L0657: 1, L0659: 1, | | |
| | | | | | | | L0663: 1, S0428: 1, | | |
| | | | | | | | H0701: 1, S0148: 1, | | |
| | | | | | | | L0438: 1, H0520: 1, | | |
| | | | | | | | H0659: 1, H0648: 1, | | |
| | | | | | | | H0672: 1, S0328: 1, | | |
| | | | | | | | S0380: 1, H0627: 1, | | |
| | | | | | | | H0631: 1, S0028: 1, | | |
| | | | | | | | L0744: 1, L0754: 1, | | |
| | | | | | | | L0756: 1, L0779: 1, | | |
| | | | | | | | L0752: 1, S0434: 1, | | |
| | | | | | | | L0605: 1, L0485: 1, | | |
| | | | | | | | H0136: 1, S0192: 1, | | |
| | | | | | | | H0543: 1, H0422: 1 and | | |
| | | | | | | | S0412: 1 | | |
| | | 974684 | 190 | 1-780 | 474 | Leu-27 to Pro-34, | | | |
| | | | | | | Pro-40 to Lys-51, | | | |
| | | | | | | Asn-85 to Phe-90, | | | |
| | | | | | | Arg-102 to Leu-140, | | | |
| | | | | | | Gly-145 to Asp-191, | | | |
| | | | | | | Glu-219 to His-227. | | | |
| 24 | HLTCT21 | 975033 | 34 | 9-1181 | 318 | Asp-14 to Asp-19, | AR061: 442, AR089: | 2q33-q34 | 100730, |
| | | | | | | Met-31 to Ser-41, | 190, AR051: 14, | | 118800, |
| | | | | | | Thr-77 to Ser-85, | AR050: 5, AR054: 2 | | 123660, |
| | | | | | | Gly-90 to Val-96. | H0556: 14, H0622: 7, | | 135600, |
| | | | | | | | L0662: 7, H0521: 6, | | 157655, |
| | | | | | | | L0747: 6, S0046: 5, | | 186860, |
| | | | | | | | H0052: 5, L0771: 5, | | 201460, |
| | | | | | | | L0438: 5, H0522: 5, | | 205100, |
| | | | | | | | H0555: 5, L0439: 5, | | 213700, |
| | | | | | | | H0638: 4, H0135: 4, | | 262000, |
| | | | | | | | S0028: 4, L0741: 4, | | 600258, |
| | | | | | | | H0265: 3, S0114: 3, | | 601277, |
| | | | | | | | H0618: 3, H0266: 3, | | 601318, |
| | | | | | | | S0003: 3, H0031: 3, | | |
| | | | | | | | H0553: 3, H0644: 3, | | |
| | | | | | | | H0090: 3, H0038: 3, | | |
| | | | | | | | H0056: 3, L0769: 3, | | |
| | | | | | | | H0144: 3, S0126: 3, | | |
| | | | | | | | L0744: 3, L0749: 3, | | |
| | | | | | | | L0779: 3, L0752: 3, | | |
| | | | | | | | L0758: 3, L0596: 3, | | |
| | | | | | | | H0542: 3, S0007: 2, | | |
| | | | | | | | H0549: 2, H0486: 2, | | |
| | | | | | | | H0013: 2, H0156: 2, | | |
| | | | | | | | H0036: 2, H0318: 2, | | |
| | | | | | | | H0457: 2, H0039: 2, | | |
| | | | | | | | H0673: 2, H0412: 2, | | |
| | | | | | | | S0038: 2, H0494: 2, | | |
| | | | | | | | H0641: 2, L0641: 2, | | |
| | | | | | | | L0659: 2, S0428: 2, | | |
| | | | | | | | H0701: 2, S0044: 2, | | |
| | | | | | | | S0027: 2, L0748: 2, | | |
| | | | | | | | L0754: 2, L0731: 2, | | |
| | | | | | | | H0422: 2, H0677: 2, | | |
| | | | | | | | S0342: 1, S0134: 1, | | |
| | | | | | | | H0583: 1, H0650: 1, | | |
| | | | | | | | S0116: 1, S0212: 1, | | |
| | | | | | | | S0282: 1, H0662: 1, | | |
| | | | | | | | S0418: 1, S0442: 1, | | |
| | | | | | | | H0580: 1, H0208: 1, | | |
| | | | | | | | S0045: 1, H0645: 1, | | |
| | | | | | | | H0393: 1, H0438: 1, | | |
| | | | | | | | H0257: 1, H0485: 1, | | |
| | | | | | | | T0109: 1, H0635: 1, | | |
| | | | | | | | L0021: 1, H0590: 1, | | |
| | | | | | | | H0004: 1, H0253: 1, | | |
| | | | | | | | S0346: 1, H0581: 1, | | |
| | | | | | | | H0194: 1, H0309: 1, | | |
| | | | | | | | L0040: 1, H0046: 1, | | |
| | | | | | | | H0009: 1, H0050: 1, | | |
| | | | | | | | T0003: 1, H0200: 1, | | |
| | | | | | | | S0051: 1, H0083: 1, | | |
| | | | | | | | H0099: 1, H0179: 1, | | |
| | | | | | | | H0292: 1, H0284: 1, | | |
| | | | | | | | H0428: 1, T0023: 1, | | |
| | | | | | | | H0030: 1, L0142: 1, | | |
| | | | | | | | H0032: 1, H0674: 1, | | |
| | | | | | | | S0036: 1, H0591: 1, | | |
| | | | | | | | H0040: 1, H0634: 1, | | |
| | | | | | | | H0616: 1, H0063: 1, | | |
| | | | | | | | H0551: 1, T0067: 1, | | |
| | | | | | | | H0264: 1, H0488: 1, | | |
| | | | | | | | H0413: 1, H0623: 1, | | |
| | | | | | | | S0144: 1, S0210: 1, | | |
| | | | | | | | S0002: 1, S0426: 1, | | |
| | | | | | | | L0761: 1, L0644: 1, | | |
| | | | | | | | L0764: 1, L0768: 1, | | |
| | | | | | | | L0766: 1, L0649: 1, | | |
| | | | | | | | L0527: 1, L0792: 1, | | |
| | | | | | | | L0666: 1, L0663: 1, | | |
| | | | | | | | L0664: 1, L0665: 1, | | |
| | | | | | | | S0216: 1, S0374: 1, | | |
| | | | | | | | H0689: 1, H0435: 1, | | |
| | | | | | | | H0672: 1, H0539: 1, | | |
| | | | | | | | L0602: 1, H0518: 1, | | |
| | | | | | | | S0152: 1, S0176: 1, | | |
| | | | | | | | H0187: 1, S0037: 1, | | |
| | | | | | | | S3014: 1, L0750: 1, | | |
| | | | | | | | L0777: 1, L0753: 1, | | |
| | | | | | | | L0755: 1, L0757: 1, | | |
| | | | | | | | S0031: 1, L0595: 1, | | |
| | | | | | | | L0603: 1, L0366: 1, | | |
| | | | | | | | H0543: 1, H0423: 1 and | | |
| | | | | | | | S0384: 1. | | |
| 25 | HLHGH34 | 1023772 | 35 | 3-809 | 319 | Glu-80 to Val-88. | AR061: 5, AR089: 2 | | |
| | | | | | | | S0007: 2, H0024: 2, | | |
| | | | | | | | L0749: 2, S0003: 1, | | |
| | | | | | | | H0659: 1, L0748: 1, | | |
| | | | | | | | L0740: 1, L0758: 1 and | | |
| | | | | | | | L0595: 1. | | |
| | | 575733 | 191 | 2-436 | 475 | Phe-10 to Asn-18, | | | |
| | | | | | | Leu-80 to Ile-86, | | | |
| | | | | | | Ile-118 to Arg-123. | | | |
| 26 | HFXBN61 | 1172816 | 36 | 1102-425 | 320 | Ser-9 to His-14, | AR061: 7, AR089: 3, | | |
| | | | | | | Thr-16 to Leu-23, | AR051: 1, AR054: 1, | | |
| | | | | | | Gly-59 to Cys-69, | AR050: 0 | | |
| | | | | | | Arg-76 to Val-82, | L0439: 8, L0751: 6, | | |
| | | | | | | Ser-105 to Gly-111, | S0001: 1, S0376: 1, | | |
| | | | | | | Val-119 to Gly-124, | H0261: 1, S0222: 1, | | |
| | | | | | | Pro-141 to His-155, | S0051: 1, S0380: 1 and | | |
| | | | | | | Gly-181 to Gly-187, | S0106: 1. | | |
| | | | | | | Glu-218 to Cys-223. | | | |
| | | 577367 | 192 | 1-552 | 476 | Trp-22 to Leu-29, | | | |
| | | | | | | Pro-110 to Asp-117. | | | |
| 27 | HSLFT94 | 1199828 | 37 | 3-521 | 321 | Lys-16 to Arg-23, | AR089: 1, AR061: 1 | | |
| | | | | | | Gln-55 to Ile-62, | S0028: 2 and S0044: 1. | | |
| | | | | | | Pro-159 to Glu-165, | | | |
| | | | | | | Gln-168 to Ser-173. | | | |
| | | 603023 | 193 | 3-323 | 477 | Lys-16 to Arg-23, | | | |
| | | | | | | Gln-55 to Ile-62, | | | |
| | | | | | | Pro-99 to Asn-105. | | | |
| 28 | HELGW31 | 610003 | 38 | 576-1337 | 322 | Asp-56 to Ser-62, | AR061: 335, AR089: | | |
| | | | | | | Gly-195 to Ser-202. | 290, AR051: 10, | | |
| | | | | | | | AR050: 2, AR054: 2 | | |
| | | | | | | | S0045: 1 | | |
| | | 957568 | 194 | 1035-394 | 478 | | | | |
| | | 964303 | 195 | 21-449 | 479 | | | | |
| 29 | HDJME16 | 1206706 | 39 | 3-1571 | 323 | Thr-1 to Gly-7, | AR061: 1, AR089: 0 | | |
| | | | | | | Ser-11 to Ala-19, | S0360: 2, H0553: 2, | | |
| | | | | | | Leu-54 to Gln-59, | L0776: 2, L0744: 2, | | |
| | | | | | | Tyr-64 to Ala-76, | L0747: 2, L0750: 2, | | |
| | | | | | | Ala-80 to Thr-86, | H0542: 2, S0110: 1, | | |
| | | | | | | Gln-93 to Glu-107, | S0400: 1, H0441: 1, | | |
| | | | | | | Glu-121 to Val-127, | H0392: 1, H0156: 1, | | |
| | | | | | | Lys-137 to Asn-150, | S0051: 1, H0687: 1, | | |
| | | | | | | Thr-168 to Leu-177, | H0135: 1, H0087: 1, | | |
| | | | | | | Glu-209 to Ala-219, | H0647: 1, L0631: 1, | | |
| | | | | | | Arg-222 to Glu-232, | L0638: 1, L0774: 1, | | |
| | | | | | | Ala-348 to Arg-366, | L0775: 1, L0659: 1, | | |
| | | | | | | Thr-430 to His-442, | H0547: 1, S0380: 1, | | |
| | | | | | | His-444 to Pro-461, | S0332: 1, L0743: 1, | | |
| | | | | | | Pro-463 to Ser-485, | L0749: 1 and L0777: 1. | | |
| | | | | | | Gly-498 to Ser-503, | | | |
| | | | | | | Arg-514 to Lys-523. | | | |
| | | 661396 | 196 | 1-486 | 480 | Ser-8 to Ala-16, | | | |
| | | | | | | Leu-51 to Gln-56, | | | |
| | | | | | | Tyr-61 to Ala-73, | | | |
| | | | | | | Ala-77 to Thr-83, | | | |
| | | | | | | Gln-90 to Glu-104, | | | |
| | | | | | | Glu-118 to Asp-127. | | | |
| 30 | HISAR63 | 1199655 | 40 | 185-874 | 324 | Gln-25 to Gln-31, | AR089: 6, AR061: 2 | | |
| | | | | | | Gly-44 to Gly-50, | S0003: 7, L0758: 5, | | |
| | | | | | | Leu-60 to Arg-69, | H0547: 4, H0539: 3, | | |
| | | | | | | Thr-103 to Gln-108, | L0745: 3, S0040: 2, | | |
| | | | | | | Val-136 to Val-142, | H0650: 2, H0657: 2, | | |
| | | | | | | Thr-149 to Arg-170, | H0013: 2, H0250: 2, | | |
| | | | | | | Tyr-197 to Tyr-207, | H0036: 2, H0591: 2, | | |
| | | | | | | Glu-213 to Asn-219. | H0038: 2, H0623: 2, | | |
| | | | | | | | L0438: 2, H0435: 2, | | |
| | | | | | | | S0330: 2, L0439: 2, | | |
| | | | | | | | H0624: 1, H0556: 1, | | |
| | | | | | | | L0002: 1, H0656: 1, | | |
| | | | | | | | S0116: 1, H0663: 1, | | |
| | | | | | | | S0045: 1, H0415: 1, | | |
| | | | | | | | H0497: 1, H0635: 1, | | |
| | | | | | | | H0575: 1, H0318: 1, | | |
| | | | | | | | S0474: 1, H0581: 1, | | |
| | | | | | | | H0251: 1, T0115: 1, | | |
| | | | | | | | L0471: 1, H0024: 1, | | |
| | | | | | | | H0014: 1, S0214: 1, | | |
| | | | | | | | H0328: 1, H0673: 1, | | |
| | | | | | | | H0674: 1, H0040: 1, | | |
| | | | | | | | H0634: 1, H0616: 1, | | |
| | | | | | | | T0067: 1, H0413: 1, | | |
| | | | | | | | T0042: 1, H0561: 1, | | |
| | | | | | | | H0641: 1, L0764: 1, | | |
| | | | | | | | L0776: 1, H0520: 1, | | |
| | | | | | | | H0519: 1, S0380: 1, | | |
| | | | | | | | H0521: 1, S0027: 1, | | |
| | | | | | | | L0750: 1, L0777: 1, | | |
| | | | | | | | L0752: 1, L0731: 1, | | |
| | | | | | | | H0445: 1, L0594: 1, | | |
| | | | | | | | S0192: 1 and H0543: 1. | | |
| | | 683630 | 197 | 137-400 | 481 | Tyr-4 to Arg-10, | | | |
| | | | | | | Gln-37 to Gln-43, | | | |
| | | | | | | Gly-56 to Gly-62, | | | |
| | | | | | | Leu-72 to Val-80. | | | |
| 31 | HE8DL23 | 693641 | 41 | 29-406 | 325 | Leu-68 to Gln-77. | AR089: 1, AR061: 0 | | |
| 32 | HAJCL60 | 1218435 | 42 | 205-1542 | 326 | Thr-39 to Lys-48, | AR089: 4, AR061: 3 | | |
| | | | | | | Arg-64 to Val-69, | L0748: 2, H0638: 1, | | |
| | | | | | | Ser-101 to Ala-106, | S0354: 1, L0021: 1, | | |
| | | | | | | Asn-109 to Tyr-115, | H0561: 1 and L0764: 1. | | |
| | | | | | | Glu-167 to Lys-173, | | | |
| | | | | | | Ser-200 to Asp-206, | | | |
| | | | | | | Ile-362 to Thr-368. | | | |
| | | 717266 | 198 | 187-561 | 482 | Thr-39 to Lys-48, | | | |
| | | | | | | Arg-64 to Val-69. | | | |
| 33 | HNGJI55 | 722240 | 43 | 1-303 | 327 | Arg-1 to Asp-11, | AR050: 48, AR054: | | |
| | | | | | | Thr-15 to Thr-21, | 42, AR051: 37, AR061: | | |
| | | | | | | Pro-93 to Glu-101. | 6, AR089: 3 | | |
| | | | | | | | H0164: 1, S0052: 1 and | | |
| | | | | | | | S0031: 1. | | |
| | | 868063 | 199 | 218-646 | 483 | His-8 to Gly-18, | | | |
| | | | | | | Glu-30 to Asp-36, | | | |
| | | | | | | Thr-40 to Thr-46, | | | |
| | | | | | | Pro-118 to Ala-133. | | | |
| 34 | HSDIF59 | 1207943 | 44 | 297-905 | 328 | Pro-19 to Thr-31, | AR089: 4, AR061: 2 | | |
| | | | | | | Arg-185 to Arg-190. | S0218: 1, S0222: 1, | | |
| | | | | | | | H0617: 1, S0150: 1 and | | |
| | | | | | | | S0260: 1. | | |
| | | 739212 | 200 | 282-752 | 484 | Pro-19 to Thr-31, | | | |
| | | | | | | Asp-137 to Ser-143. | | | |
| 35 | HKABW26 | 1127499 | 45 | 788-90 | 329 | Ser-5 to Met-13, | AR089: 8, AR061: 3 | | |
| | | | | | | Asn-223 to Thr-231. | L0766: 3, L0803: 3, | | |
| | | | | | | | L0756: 3, H0170: 2, | | |
| | | | | | | | L0805: 2, L0776: 2, | | |
| | | | | | | | L0759: 2, H0624: 1, | | |
| | | | | | | | S0114: 1, S0212: 1, | | |
| | | | | | | | S0222: 1, S6014: 1, | | |
| | | | | | | | H0013: 1, H0081: 1, | | |
| | | | | | | | H0014: 1, S0003: 1, | | |
| | | | | | | | T0041: 1, H0494: 1, | | |
| | | | | | | | H0625: 1, L0598: 1, | | |
| | | | | | | | H0529: 1, L0763: 1, | | |
| | | | | | | | L0761: 1, L0657: 1, | | |
| | | | | | | | L0790: 1, L0663: 1, | | |
| | | | | | | | H0144: 1, H0659: 1, | | |
| | | | | | | | S0328: 1, S0380: 1, | | |
| | | | | | | | H0478: 1, L0750: 1, | | |
| | | | | | | | L0779: 1, L0731: 1, | | |
| | | | | | | | H0445: 1 and H0423: 1. | | |
| | | 740892 | 201 | 472-80 | 485 | | | | |
| 36 | HE9HE89 | 1189795 | 46 | 1-912 | 330 | Ser-10 to Met-18, | AR061: 3, AR089: 1 | | |
| | | | | | | Ala-263 to Pro-271. | L0766: 3, L0803: 3, | | |
| | | | | | | | L0756: 3, H0170: 2, | | |
| | | | | | | | L0805: 2, L0776: 2, | | |
| | | | | | | | L0759: 2, H0624: 1, | | |
| | | | | | | | S0114: 1, S0212: 1, | | |
| | | | | | | | S0222: 1, S6014: 1, | | |
| | | | | | | | H0013: 1, H0081: 1, | | |
| | | | | | | | H0014: 1, S0003: 1, | | |
| | | | | | | | T0041: 1, H0494: 1, | | |
| | | | | | | | H0625: 1, L0598: 1, | | |
| | | | | | | | H0529: 1, L0763: 1, | | |
| | | | | | | | L0761: 1, L0657: 1, | | |
| | | | | | | | L0790: 1, L0663: 1, | | |
| | | | | | | | H0144: 1, H0659: 1, | | |
| | | | | | | | S0328: 1, S0380: 1, | | |
| | | | | | | | H0478: 1, L0750: 1, | | |
| | | | | | | | L0779: 1, L0731: 1, | | |
| | | | | | | | H0445: 1 and H0423: 1. | | |
| | | 740893 | 202 | 2-904 | 486 | Arg-1 to Glu-9. | | | |
| 37 | HEONO59 | 741361 | 47 | 325-756 | 331 | | AR089: 5, AR061: 3 | | |
| | | | | | | | H0457: 1 and L0752: 1. | | |
| 38 | HE6BQ76 | 775616 | 48 | 2-298 | 332 | Thr-10 to Ala-21, | AR061: 202, AR089: | | |
| | | | | | | Gln-35 to Trp-45, | 136 | | |
| | | | | | | Gly-54 to Leu-61. | | | |
| 39 | HDPYE27 | 1216489 | 49 | 297-794 | 333 | Leu-15 to Gly-20, | AR089: 0, AR061: 0 | | |
| | | | | | | Ser-60 to Val-72, | L0777: 5, H0521: 3, | | |
| | | | | | | Pro-80 to Arg-106, | H0375: 2, L0803: 2, | | |
| | | | | | | His-131 to Tyr-143. | L0774: 2, L0752: 2, | | |
| | | | | | | | H0580: 1, H0645: 1, | | |
| | | | | | | | H0550: 1, H0431: 1, | | |
| | | | | | | | T0109: 1, S0003: 1, | | |
| | | | | | | | H0615: 1, H0032: 1, | | |
| | | | | | | | H0591: 1, H0040: 1, | | |
| | | | | | | | T0067: 1, H0379: 1, | | |
| | | | | | | | H0623: 1, S0426: 1, | | |
| | | | | | | | L0770: 1, L0796: 1, | | |
| | | | | | | | L0761: 1, L0800: 1, | | |
| | | | | | | | L0771: 1, L0766: 1, | | |
| | | | | | | | L0775: 1, L0806: 1, | | |
| | | | | | | | L0805: 1, L0809: 1, | | |
| | | | | | | | H0519: 1, H0659: 1, | | |
| | | | | | | | L0740: 1, L0750: 1, | | |
| | | | | | | | L0594: 1 and S0026: 1. | | |
| | | 789696 | 203 | 257-682 | 487 | Trp-1 to Ser-8, | | | |
| | | | | | | His-11 to Asn-16, | | | |
| | | | | | | Gln-19 to Pro-25, | | | |
| | | | | | | Gly-38 to Gly-44, | | | |
| | | | | | | Leu-54 to Arg-62, | | | |
| | | | | | | Ser-70 to Asp-78, | | | |
| | | | | | | Gln-83 to Ser-88. | | | |
| 40 | HDPCN94 | 1216484 | 50 | 3-2159 | 334 | Phe-9 to Ser-15, | AR089: 5, AR061: 2 | | |
| | | | | | | Pro-19 to Leu-25, | H0521: 2 | | |
| | | | | | | Asp-31 to Ser-42, | | | |
| | | | | | | Leu-51 to Thr-59, | | | |
| | | | | | | His-65 to Ser-75, | | | |
| | | | | | | Glu-95 to Pro-107, | | | |
| | | | | | | Val-126 to Tyr-132, | | | |
| | | | | | | Glu-193 to Phe-198, | | | |
| | | | | | | Ala-248 to Leu-259, | | | |
| | | | | | | Thr-284 to Glu-290, | | | |
| | | | | | | Ser-330 to Val-336, | | | |
| | | | | | | Lys-361 to Leu-366, | | | |
| | | | | | | Glu-383 to Asp-403, | | | |
| | | | | | | Ala-426 to Ser-432, | | | |
| | | | | | | Ser-441 to Thr-449, | | | |
| | | | | | | Asp-457 to Asn-463, | | | |
| | | | | | | Glu-474 to Lys-481, | | | |
| | | | | | | Ser-519 to Lys-530, | | | |
| | | | | | | Ser-543 to Gly-549, | | | |
| | | | | | | Ala-553 to His-569, | | | |
| | | | | | | Asp-588 to Lys-604, | | | |
| | | | | | | Arg-614 to Val-646, | | | |
| | | | | | | Lys-654 to Gly-665, | | | |
| | | | | | | Gln-675 to Ala-684, | | | |
| | | | | | | Glu-712 to Ser-719. | | | |
| | | 794275 | 204 | 3-767 | 488 | | | | |
| 41 | HDPDH64 | 796509 | 51 | 1-303 | 335 | Pro-5 to Lys-22, | AR089: 3, AR061: 1 | | |
| | | | | | | Arg-43 to Glu-51, | H0521: 6, H0580: 1, | | |
| | | | | | | Arg-63 to Ala-71, | H0012: 1, L0800: 1, | | |
| | | | | | | Asp-73 to Lys-79. | H0522: 1 and L0595: 1. | | |
| 42 | HFIJC31 | 828148 | 52 | 72-518 | 336 | Glu-8 to Ile-20, | AR089: 2, AR061: 1 | | |
| | | | | | | Pro-22 to Pro-28, | L0804: 1, L0809: 1, | | |
| | | | | | | Glu-46 to Trp-58. | L0788: 1, H0593: 1, | | |
| | | | | | | | L0756: 1 and S0194: 1. | | |
| 43 | HACCH94 | 847143 | 53 | 1-897 | 337 | Gly-1 to Ser-6, | AR061: 4, AR089: 2 | | |
| | | | | | | Arg-76 to Gln-88, | L0754: 6, L0766: 3, | | |
| | | | | | | Lys-113 to Ser-119, | L0731: 2, H0624: 1, | | |
| | | | | | | Tyr-125 to Lys-132, | H0170: 1, S0116: 1, | | |
| | | | | | | Ser-167 to Tyr-179, | S0280: 1, H0545: 1, | | |
| | | | | | | Arg-263 to Tyr-281, | T0006: 1, S0344: 1, | | |
| | | | | | | Ser-294 to Thr-299. | S0426: 1, L0770: 1, | | |
| | | | | | | | L0790: 1, L0748: 1, | | |
| | | | | | | | L0756: 1, L0779: 1, | | |
| | | | | | | | L0589: 1 and L0462: 1. | | |
| 44 | HSLAE47 | 1158024 | 54 | 362-3 | 338 | Val-28 to Arg-33. | AR089: 1, AR061: 0 | | |
| | | | | | | | H0318: 1 and S0028: 1. | | |
| | | 847954 | 205 | 150-509 | 489 | Val-28 to Arg-33. | | | |
| 45 | HTEED80 | 849075 | 55 | 182-850 | 339 | | AR089: 13, AR061: 12 | | |
| | | | | | | | L0766: 5, L0759: 5, | | |
| | | | | | | | L0794: 3, L0775: 3, | | |
| | | | | | | | L0779: 3, H0038: 2, | | |
| | | | | | | | L0763: 2, L0774: 2, | | |
| | | | | | | | L0518: 2, L0528: 2, | | |
| | | | | | | | L0790: 2, L0665: 2, | | |
| | | | | | | | H0144: 2, H0670: 2, | | |
| | | | | | | | L0599: 2, H0663: 1, | | |
| | | | | | | | S0444: 1, H0486: 1, | | |
| | | | | | | | T0060: 1, H0013: 1, | | |
| | | | | | | | S0280: 1, S0050: 1, | | |
| | | | | | | | S6028: 1, H0615: 1, | | |
| | | | | | | | H0030: 1, H0553: 1, | | |
| | | | | | | | H0634: 1, H0647: 1, | | |
| | | | | | | | H0654: 1, H0529: 1, | | |
| | | | | | | | L0638: 1, L0761: 1, | | |
| | | | | | | | L0771: 1, L0773: 1, | | |
| | | | | | | | L0767: 1, L0387: 1, | | |
| | | | | | | | L0803: 1, L0804: 1, | | |
| | | | | | | | L0607: 1, L0657: 1, | | |
| | | | | | | | L0517: 1, L0809: 1, | | |
| | | | | | | | H0648: 1, H0672: 1, | | |
| | | | | | | | L0748: 1, L0740: 1, | | |
| | | | | | | | L0749: 1, L0756: 1, | | |
| | | | | | | | L0758: 1, L0591: 1, | | |
| | | | | | | | L0592: 1 and H0543: 1. | | |
| 46 | HNTBH68 | 1109052 | 56 | 2-550 | 340 | Ala-54 to Ser-60, | AR089: 6, AR061: 3 | | |
| | | | | | | Glu-111 to Trp-116, | L0005: 1, H0144: 1, | | |
| | | | | | | Phe-141 to Glu-149. | L0438: 1, H0519: 1, | | |
| | | | | | | | H0539: 1 and L0439: 1. | | |
| | | 851274 | 206 | 1-540 | 490 | Ala-51 to Ser-57, | | | |
| | | | | | | Glu-108 to Trp-113, | | | |
| | | | | | | Phe-138 to Glu-146. | | | |
| 47 | HAJBU67 | 1186051 | 57 | 566-1444 | 341 | Ala-12 to Phe-18. | AR061: 1, AR089: 1 | | |
| | | | | | | | H0585: 9, H0265: 2, | | |
| | | | | | | | H0141: 2, S0360: 2, | | |
| | | | | | | | H0251: 2, H0031: 2, | | |
| | | | | | | | L0519: 2, L0545: 2, | | |
| | | | | | | | L0664: 2, H0668: 2, | | |
| | | | | | | | S0040: 1, T0049: 1, | | |
| | | | | | | | H0656: 1, H0255: 1, | | |
| | | | | | | | S0376: 1, S0132: 1, | | |
| | | | | | | | H0546: 1, H0375: 1, | | |
| | | | | | | | S0314: 1, H0428: 1, | | |
| | | | | | | | H0039: 1, H0553: 1, | | |
| | | | | | | | L0055: 1, H0264: 1, | | |
| | | | | | | | H0561: 1, H0509: 1, | | |
| | | | | | | | L0643: 1, L0803: 1, | | |
| | | | | | | | L0651: 1, L0378: 1, | | |
| | | | | | | | L0776: 1, L0659: 1, | | |
| | | | | | | | L0790: 1, L0666: 1, | | |
| | | | | | | | H0519: 1, S0126: 1, | | |
| | | | | | | | H0521: 1, H0576: 1, | | |
| | | | | | | | L0777: 1, L0755: 1, | | |
| | | | | | | | L0731: 1, L0757: 1, | | |
| | | | | | | | L0759: 1, H0665: 1, | | |
| | | | | | | | S0194: 1 and S0458: 1. | | |
| | | 856922 | 207 | 340-729 | 491 | Pro-1 to Arg-8. | | | |
| 48 | HE2OI42 | 857135 | 58 | 357-1562 | 342 | | AR089: 0, AR061: 0 | | |
| | | | | | | | H0170: 1, H0431: 1, | | |
| | | | | | | | H0432: 1, H0597: 1, | | |
| | | | | | | | H0012: 1, H0057: 1, | | |
| | | | | | | | H0038: 1, H0641: 1, | | |
| | | | | | | | L0662: 1, L0659: 1, | | |
| | | | | | | | H0672: 1, L0779: 1 and | | |
| | | | | | | | L0599: 1. | | |
| 49 | HISAR24 | 1206561 | 59 | 1-654 | 343 | Pro-1 to Arg-8, | AR089: 4, AR061: 1 | | |
| | | | | | | Gln-13 to Gln-19, | L0731: 9, S0003: 8, | | |
| | | | | | | Gly-32 to Gly-38, | H0038: 8, H0547: 8, | | |
| | | | | | | Leu-48 to Arg-57, | L0766: 6, L0745: 6, | | |
| | | | | | | Thr-91 to Gln-96, | L0758: 6, H0616: 5, | | |
| | | | | | | Val-124 to Val-130, | H0657: 4, H0013: 4, | | |
| | | | | | | Thr-137 to Arg-158, | L0598: 4, L0774: 4, | | |
| | | | | | | Tyr-185 to Tyr-195, | L0438: 4, L0439: 4, | | |
| | | | | | | Glu-201 to Asn-207. | L0752: 4, H0486: 3, | | |
| | | | | | | | H0250: 3, L0775: 3, | | |
| | | | | | | | H0539: 3, L0594: 3, | | |
| | | | | | | | L0362: 3, H0170: 2, | | |
| | | | | | | | S0040: 2, H0650: 2, | | |
| | | | | | | | S0045: 2, H0575: 2, | | |
| | | | | | | | H0036: 2, H0581: 2, | | |
| | | | | | | | H0591: 2, H0623: 2, | | |
| | | | | | | | H0494: 2, S0210: 2, | | |
| | | | | | | | L0770: 2, L0651: 2, | | |
| | | | | | | | L0555: 2, L0655: 2, | | |
| | | | | | | | L0665: 2, H0519: 2, | | |
| | | | | | | | S0126: 2, H0435: 2, | | |
| | | | | | | | S0330: 2, L0740: 2, | | |
| | | | | | | | L0750: 2, L0777: 2, | | |
| | | | | | | | S0412: 2, H0624: 1, | | |
| | | | | | | | H0394: 1, H0556: 1, | | |
| | | | | | | | L0002: 1, H0656: 1, | | |
| | | | | | | | S0116: 1, H0663: 1, | | |
| | | | | | | | S0418: 1, S0358: 1, | | |
| | | | | | | | S0360: 1, H0441: 1, | | |
| | | | | | | | H0415: 1, H0497: 1, | | |
| | | | | | | | H0574: 1, T0039: 1, | | |
| | | | | | | | H0635: 1, H0156: 1, | | |
| | | | | | | | H0318: 1, S0474: 1, | | |
| | | | | | | | T0115: 1, T0110: 1, | | |
| | | | | | | | L0471: 1, H0024: 1, | | |
| | | | | | | | H0014: 1, L0163: 1, | | |
| | | | | | | | H0083: 1, H0594: 1, | | |
| | | | | | | | S0214: 1, H0328: 1, | | |
| | | | | | | | H0644: 1, L0055: 1, | | |
| | | | | | | | H0673: 1, H0674: 1, | | |
| | | | | | | | H0040: 1, H0551: 1, | | |
| | | | | | | | T0067: 1, H0412: 1, | | |
| | | | | | | | H0413: 1, T0042: 1, | | |
| | | | | | | | H0561: 1, H0641: 1, | | |
| | | | | | | | S0426: 1, UNKWN: 1, | | |
| | | | | | | | H0529: 1, L0520: 1, | | |
| | | | | | | | L0625: 1, L0637: 1, | | |
| | | | | | | | L0627: 1, L0772: 1, | | |
| | | | | | | | L0646: 1, L0773: 1, | | |
| | | | | | | | L0521: 1, L0662: 1, | | |
| | | | | | | | L0768: 1, L0522: 1, | | |
| | | | | | | | L0650: 1, L0375: 1, | | |
| | | | | | | | L0806: 1, L0776: 1, | | |
| | | | | | | | L0656: 1, L0790: 1, | | |
| | | | | | | | L0666: 1, L0663: 1, | | |
| | | | | | | | L0664: 1, H0144: 1, | | |
| | | | | | | | S0374: 1, H0520: 1, | | |
| | | | | | | | H0659: 1, H0660: 1, | | |
| | | | | | | | H0672: 1, S0380: 1, | | |
| | | | | | | | H0521: 1, H0696: 1, | | |
| | | | | | | | S0027: 1, S0028: 1, | | |
| | | | | | | | L0753: 1, L0759: 1, | | |
| | | | | | | | H0445: 1, L0587: 1, | | |
| | | | | | | | L0592: 1, L0608: 1, | | |
| | | | | | | | L0361: 1 and S0192: 1. | | |
| | | 858494 | 208 | 2-511 | 492 | Gln-9 to Gln-15, | | | |
| | | | | | | Gly-28 to Gly-34, | | | |
| | | | | | | Leu-44 to Arg-53. | | | |
| 50 | HMEKO39 | 1228120 | 60 | 682-194 | 344 | Pro-29 to Gly-37, | AR061: 5, AR089: 3 | | |
| | | | | | | Ala-47 to His-64, | L0741: 5, L0751: 4, | | |
| | | | | | | Gln-80 to Phe-93, | L0777: 4, S0007: 3, | | |
| | | | | | | Thr-145 to Arg-161. | H0575: 3, L0747: 3, | | |
| | | | | | | | L0592: 3, S0212: 2, | | |
| | | | | | | | H0545: 2, H0266: 2, | | |
| | | | | | | | L0769: 2, L0771: 2, | | |
| | | | | | | | L0768: 2, L0794: 2, | | |
| | | | | | | | L0789: 2, H0144: 2, | | |
| | | | | | | | L0352: 2, S0028: 2, | | |
| | | | | | | | L0742: 2, L0439: 2, | | |
| | | | | | | | L0754: 2, L0779: 2, | | |
| | | | | | | | L0755: 2, S0418: 1, | | |
| | | | | | | | S0420: 1, S0376: 1, | | |
| | | | | | | | S0300: 1, H0438: 1, | | |
| | | | | | | | H0327: 1, H0009: 1, | | |
| | | | | | | | H0123: 1, H0594: 1, | | |
| | | | | | | | H0179: 1, H0271: 1, | | |
| | | | | | | | H0615: 1, H0628: 1, | | |
| | | | | | | | H0551: 1, S0038: 1, | | |
| | | | | | | | H0100: 1, S0464: 1, | | |
| | | | | | | | S0210: 1, L0369: 1, | | |
| | | | | | | | L0761: 1, L0800: 1, | | |
| | | | | | | | L0764: 1, L0521: 1, | | |
| | | | | | | | L0806: 1, L0659: 1, | | |
| | | | | | | | L0809: 1, L0367: 1, | | |
| | | | | | | | H0435: 1, S0152: 1, | | |
| | | | | | | | H0696: 1, L0756: 1, | | |
| | | | | | | | L0757: 1 and L0758: 1. | | |
| | | 863507 | 209 | 2-610 | 493 | Pro-67 to Pro-72. | | | |
| 51 | H7TBC95 | 865922 | 61 | 3-704 | 345 | Gln-154 to Ser-163. | AR089: 1, AR061: 1 | | |
| | | | | | | | S0198: 57, S0274: 12, | | |
| | | | | | | | S0252: 4, S0270: 3, | | |
| | | | | | | | S0264: 1, S0268: 1 and | | |
| | | | | | | | S0228: 1. | | |
| | | 908115 | 210 | 3-704 | 494 | Gln-154 to Ser-163. | | | |
| 52 | HPMBZ21 | 867222 | 62 | 1-456 | 346 | Ala-63 to Phe-69, | AR089: 7, AR061: 6 | | |
| | | | | | | Lys-79 to Ser-86, | H0031: 1 and H0555: 1. | | |
| | | | | | | Pro-104 to Asp-117, | | | |
| | | | | | | Lys-123 to Lys-129. | | | |
| 53 | HLHTE91 | 789603 | 63 | 1-1203 | 347 | | AR050: 526, AR054: | | |
| | | | | | | | 486, AR051: 283, | | |
| | | | | | | | AR089: 1, AR061: 1 | | |
| | | | | | | | L0439: 5, L0662: 4, | | |
| | | | | | | | H0543: 4, L0766: 3, | | |
| | | | | | | | L0665: 3, L0751: 3, | | |
| | | | | | | | L0777: 3, H0618: 2, | | |
| | | | | | | | H0052: 2, H0024: 2, | | |
| | | | | | | | L0666: 2, H0265: 1, | | |
| | | | | | | | S0212: 1, H0580: 1, | | |
| | | | | | | | H0208: 1, H0393: 1, | | |
| | | | | | | | H0549: 1, H0550: 1, | | |
| | | | | | | | S0222: 1, H0333: 1, | | |
| | | | | | | | H0559: 1, H0486: 1, | | |
| | | | | | | | T0114: 1, S0049: 1, | | |
| | | | | | | | H0041: 1, H0083: 1, | | |
| | | | | | | | H0615: 1, L0055: 1, | | |
| | | | | | | | H0135: 1, H0038: 1, | | |
| | | | | | | | H0634: 1, H0616: 1, | | |
| | | | | | | | H0413: 1, L0370: 1, | | |
| | | | | | | | L0770: 1, L0800: 1, | | |
| | | | | | | | L0768: 1, L0794: 1, | | |
| | | | | | | | L0803: 1, L0804: 1, | | |
| | | | | | | | L0653: 1, L0658: 1, | | |
| | | | | | | | L0789: 1, H0520: 1, | | |
| | | | | | | | H0660: 1, S0044: 1, | | |
| | | | | | | | S0146: 1, L0743: 1, | | |
| | | | | | | | L0740: 1, L0749: 1, | | |
| | | | | | | | L0750: 1, L0779: 1, | | |
| | | | | | | | L0752: 1, L0755: 1, | | |
| | | | | | | | L0731: 1 and H0423: 1. | | |
| | | 868803 | 211 | 3-1151 | 495 | Leu-16 to Lys-21, | | | |
| | | | | | | Arg-30 to Pro-36, | | | |
| | | | | | | Ser-44 to Thr-49, | | | |
| | | | | | | Arg-136 to Arg-150, | | | |
| | | | | | | Leu-160 to Cys-173, | | | |
| | | | | | | Glu-223 to Gly-228, | | | |
| | | | | | | Gly-241 to Gln-249, | | | |
| | | | | | | Ala-260 to Gly-265, | | | |
| | | | | | | Ile-334 to Thr-349, | | | |
| | | | | | | Arg-364 to Glu-371. | | | |
| | | 969604 | 212 | 618-355 | 496 | | | | |
| 54 | HTEPX32 | 1134915 | 64 | 91-1212 | 348 | Ser-10 to Gly-15, | AR089: 11, AR061: 2 | | |
| | | | | | | Pro-20 to Ser-27, | H0038: 6, H0616: 6, | | |
| | | | | | | Glu-34 to Gly-41, | L0794: 4, L0768: 1 and | | |
| | | | | | | Ala-45 to Trp-50, | L0758: 1. | | |
| | | | | | | Pro-79 to Gly-88, | | | |
| | | | | | | Gly-187 to Asn-196, | | | |
| | | | | | | Asp-209 to Ile-215, | | | |
| | | | | | | Ser-265 to Tyr-273, | | | |
| | | | | | | Gly-296 to Arg-309. | | | |
| | | 870698 | 213 | 91-699 | 497 | Ser-10 to Gly-15, | | | |
| | | | | | | Pro-20 to Ser-27, | | | |
| | | | | | | Glu-34 to Gly-41, | | | |
| | | | | | | Ala-45 to Trp-50, | | | |
| | | | | | | Pro-79 to Gly-88. | | | |
| 55 | HE8AM04 | 871156 | 65 | 3-518 | 349 | | AR061: 223, AR089: | | |
| | | | | | | | 167 | | |
| | | | | | | | H0013: 2, H0135: 1 | | |
| | | | | | | | and H0633: 1. | | |
| 56 | HIBEF26 | 871533 | 66 | 2-442 | 350 | Leu-3 to Lys-15, | AR089: 1, AR061: 1, | | |
| | | | | | | Tyr-25 to Ser-47, | L0005: 5, L0741: 5, | | |
| | | | | | | Ser-55 to Gly-63, | S0007: 4, L0754: 4, | | |
| | | | | | | Glu-111 to Gly-123. | S0222: 3, H0052: 3, | | |
| | | | | | | | L0742: 3, L0756: 3, | | |
| | | | | | | | H0013: 2, H0009: 2, | | |
| | | | | | | | T0010: 2, L0769: 2, | | |
| | | | | | | | L0438: 2, L0439: 2, | | |
| | | | | | | | H0661: 1, S0356: 1, | | |
| | | | | | | | H0351: 1, S6016: 1, | | |
| | | | | | | | S0010: 1, S0346: 1, | | |
| | | | | | | | L2250: 1, L0157: 1, | | |
| | | | | | | | H0103: 1, S0050: 1, | | |
| | | | | | | | L0770: 1, L0638: 1, | | |
| | | | | | | | L0794: 1, L0659: 1, | | |
| | | | | | | | L0664: 1, S0380: 1, | | |
| | | | | | | | L0759: 1, L0592: 1, | | |
| | | | | | | | S0106: 1 and S0021: 1. | | |
| 57 | HAOAE45 | 1114497 | 67 | 3-719 | 351 | Ala-67 to Arg-80, | AR089: 414, AR061: | | |
| | | | | | | Pro-153 to Met-162, | 79 | | |
| | | | | | | Arg-188 to Asp-194, | L0751: 2, H0341: 1, | | |
| | | | | | | Glu-208 to Leu-214, | S0132: 1, H0550: 1, | | |
| | | | | | | Leu-220 to Asp-225. | S0222: 1, H0431: 1, | | |
| | | | | | | | H0046: 1, L0471: 1, | | |
| | | | | | | | H0083: 1, S0314: 1, | | |
| | | | | | | | H0031: 1, H0644: 1, | | |
| | | | | | | | H0488: 1, H0413: 1, | | |
| | | | | | | | T0041: 1, S0150: 1, | | |
| | | | | | | | S0344: 1, L0662: 1, | | |
| | | | | | | | L0657: 1, L0663: 1, | | |
| | | | | | | | S0374: 1, H0519: 1, | | |
| | | | | | | | L0748: 1 and L0592: 1. | | |
| | | 876157 | 214 | 3-440 | 498 | | | | |
| 58 | HSDIT49 | 1169473 | 68 | 352-882 | 352 | | AR089: 0, AR061: 0 | | |
| | | | | | | | S0028: 3, H0191: 2, | | |
| | | | | | | | H0271: 2, H0617: 2, | | |
| | | | | | | | S0001: 1, H0150: 1, | | |
| | | | | | | | S0050: 1, H0031: 1, | | |
| | | | | | | | H0181: 1, S0044: 1, | | |
| | | | | | | | S0031: 1 and S0260: 1. | | |
| | | 881804 | 215 | 76-675 | 499 | | | | |
| 59 | HTLHP64 | 1189793 | 69 | 1165-542 | 353 | Thr-1 to Val-8, | AR061: 2, AR089: 1 | | |
| | | | | | | Thr-16 to Thr-29, | L0764: 4, L0777: 4, | | |
| | | | | | | Ala-38 to Pro-63, | H0618: 3, H0251: 3, | | |
| | | | | | | Pro-93 to Gly-119, | S0358: 2, H0253: 2, | | |
| | | | | | | Gly-151 to Thr-159, | H0052: 2, H0617: 2, | | |
| | | | | | | Pro-168 to Thr-173, | L0743: 2, H0657: 1, | | |
| | | | | | | Ser-175 to Arg-186. | H0255: 1, H0661: 1, | | |
| | | | | | | | H0662: 1, H0402: 1, | | |
| | | | | | | | H0638: 1, S0354: 1, | | |
| | | | | | | | L0622: 1, H0546: 1, | | |
| | | | | | | | S6028: 1, H0213: 1, | | |
| | | | | | | | L0772: 1, L0775: 1, | | |
| | | | | | | | L0657: 1, L0659: 1, | | |
| | | | | | | | L0809: 1, L0666: 1, | | |
| | | | | | | | S0330: 1, S0378: 1, | | |
| | | | | | | | H0696: 1, S0404: 1, | | |
| | | | | | | | H0478: 1, L0744: 1, | | |
| | | | | | | | L0750: 1, L0753: 1, | | |
| | | | | | | | L0731: 1 and H0445: 1 | | |
| | | 883120 | 216 | 125-445 | 500 | Ile-36 to Arg-41, | | | |
| | | | | | | Gly-69 to Lys-82. | | | |
| 60 | HETKT65 | 1110514 | 70 | 1-816 | 354 | Thr-11 to Trp-18. | AR061: 6, AR089: 5, | | |
| | | | | | | | AR054: 3, AR050: 1, | | |
| | | | | | | | AR051: 1 | | |
| | | | | | | | H0662: 1, H0638: 1, | | |
| | | | | | | | H0618: 1, H0581: 1, | | |
| | | | | | | | H0046: 1, L0352: 1, | | |
| | | | | | | | S0037: 1 and L0439: 1. | | |
| | | 887016 | 217 | 1-816 | 501 | Thr-11 to Trp-18, | | | |
| | | | | | | Arg-67 to Arg-72. | | | |
| 61 | HOHBY04 | 888190 | 71 | 214-657 | 355 | | AR089: 1, AR061: 1 | | |
| | | | | | | | S0134: 1 and S0250: 1. | | |
| 62 | HTFNP84 | 909687 | 72 | 70-1227 | 356 | Tyr-11 to Val-16, | AR089: 0, AR061: 0 | | |
| | | | | | | Glu-37 to Arg-42, | L0766: 15, L0646: 7, | | |
| | | | | | | Asn-50 to Arg-58, | H0659: 5, L0749: 5, | | |
| | | | | | | Leu-82 to Leu-96, | L0759: 5, S0374: 4, | | |
| | | | | | | Glu-112 to Gln-120. | L0804: 3, H0547: 3, | | |
| | | | | | | | H0658: 3, H0170: 2, | | |
| | | | | | | | H0650: 2, S0418: 2, | | |
| | | | | | | | S0280: 2, H0598: 2, | | |
| | | | | | | | L0763: 2, L0803: 2, | | |
| | | | | | | | L0666: 2, L0663: 2, | | |
| | | | | | | | H0435: 2, H0660: 2, | | |
| | | | | | | | L0748: 2, L0757: 2, | | |
| | | | | | | | S0026: 2, S0424: 2, | | |
| | | | | | | | H0686: 1, H0657: 1, | | |
| | | | | | | | H0662: 1, S0420: 1, | | |
| | | | | | | | S0358: 1, S0376: 1, | | |
| | | | | | | | L0717: 1, H0574: 1, | | |
| | | | | | | | H0486: 1, H0596: 1, | | |
| | | | | | | | L0471: 1, H0024: 1, | | |
| | | | | | | | H0014: 1, H0083: 1, | | |
| | | | | | | | H0510: 1, H0266: 1, | | |
| | | | | | | | S0250: 1, S0003: 1, | | |
| | | | | | | | H0428: 1, H0032: 1, | | |
| | | | | | | | H0591: 1, H0040: 1, | | |
| | | | | | | | H0634: 1, H0616: 1, | | |
| | | | | | | | H0560: 1, S0440: 1, | | |
| | | | | | | | H0641: 1, H0529: 1, | | |
| | | | | | | | L0520: 1, L0769: 1, | | |
| | | | | | | | L0761: 1, L0764: 1, | | |
| | | | | | | | L0521: 1, L0662: 1, | | |
| | | | | | | | L0774: 1, L0375: 1, | | |
| | | | | | | | L0805: 1, L0776: 1, | | |
| | | | | | | | L0655: 1, L0606: 1, | | |
| | | | | | | | L0659: 1, L0635: 1, | | |
| | | | | | | | L0367: 1, L0789: 1, | | |
| | | | | | | | L0665: 1, H0684: 1, | | |
| | | | | | | | H0670: 1, H0666: 1, | | |
| | | | | | | | H0672: 1, H0521: 1, | | |
| | | | | | | | H0704: 1, S0406: 1, | | |
| | | | | | | | L0439: 1, L0750: 1, | | |
| | | | | | | | L0756: 1, L0779: 1, | | |
| | | | | | | | L0777: 1, L0752: 1, | | |
| | | | | | | | L0755: 1, L0758: 1, | | |
| | | | | | | | L0608: 1, L0362: 1, | | |
| | | | | | | | H0667: 1, S0196: 1, | | |
| | | | | | | | H0543: 1, H0423: 1, | | |
| | | | | | | | H0422: 1, and H0352: 1. | | |
| 63 | HDQGZ78 | 1091628 | 73 | 5-1399 | 357 | Met-15 to Pro-20, | AR061: 0, AR089: 0 | | |
| | | | | | | Pro-47 to Arg-53, | H0521: 2, L0758: 2, | | |
| | | | | | | Tyr-61 to Asp-71. | H0038: 1, L0644: 1, | | |
| | | | | | | | L0645: 1, L0764: 1, | | |
| | | | | | | | L0662: 1, L0794: 1, | | |
| | | | | | | | L0557: 1, L0747: 1 and | | |
| | | | | | | | L0779: 1. | | |
| | | 909735 | 218 | 5-442 | 502 | Met-15 to Pro-20, | | | |
| | | | | | | Pro-47 to Arg-53, | | | |
| | | | | | | Tyr-61 to Asp-71. | | | |
| 64 | HHEMD52 | 909742 | 74 | 623-1618 | 358 | Trp-3 to Thr-14, | AR089: 4, AR061: 3 | | |
| | | | | | | Ala-21 to Arg-30, | H0457: 3, H0271: 3, | | |
| | | | | | | Glu-66 to Pro-74, | H0543: 3, H0422: 2, | | |
| | | | | | | Pro-103 to Gly-108, | H0583: 1, H0650: 1, | | |
| | | | | | | Ile-135 to Ile-142. | H0484: 1, H0483: 1, | | |
| | | | | | | | S0442: 1, H0580: 1, | | |
| | | | | | | | S0140: 1, H0486: 1, | | |
| | | | | | | | H0250: 1, H0050: 1, | | |
| | | | | | | | H0630: 1, H0264: 1, | | |
| | | | | | | | H0488: 1, H0487: 1, | | |
| | | | | | | | S0002: 1, L0439: 1, | | |
| | | | | | | | H0707: 1, H0136: 1 and | | |
| | | | | | | | H0677: 1. | | |
| 65 | HODFD73 | 1171995 | 75 | 2-484 | 359 | | AR061: 10, AR089: 4 | | |
| | | | | | | | H0615: 1 | | |
| | | 909812 | 219 | 1-576 | 503 | | | | |
| 66 | HIBDE74 | 1081188 | 76 | 1509-1 | 360 | Arg-1 to Gln-6, | AR089: 1, AR061: 1 | | |
| | | | | | | Arg-38 to Val-43, | L0759: 2, H0171: 1, | | |
| | | | | | | Pro-83 to His-89, | T0010: 1, H0090: 1, | | |
| | | | | | | Leu-169 to Asp-179, | L0761: 1, L0766: 1, | | |
| | | | | | | Ile-197 to Lys-206, | S3014: 1, L0745: 1, | | |
| | | | | | | Lys-262 to Lys-278, | L0747: 1 and H0506: 1. | | |
| | | | | | | Gly-304 to Gly-312, | | | |
| | | | | | | Thr-336 to Trp-343, | | | |
| | | | | | | Glu-350 to Ser-356, | | | |
| | | | | | | Lys-389 to Leu-395, | | | |
| | | | | | | Arg-455 to Glu-466. | | | |
| | | 766011 | 220 | 99-362 | 504 | | | | |
| | | 909876 | 221 | 2-751 | 505 | | | | |
| 67 | HTAIF22 | 910040 | 77 | 179-457 | 361 | | AR061: 4, AR089: 3 | | |
| | | | | | | | H0635: 1 | | |
| 68 | HUVFZ43 | 910860 | 78 | 3-1376 | 362 | Lys-68 to Lys-75, | AR089: 13, AR061: 4 | | |
| | | | | | | Lys-111 to Asn-120, | H0619: 2, H0056: 2, | | |
| | | | | | | Ser-137 to Leu-153, | S0132: 1, H0266: 1, | | |
| | | | | | | Gln-155 to Gly-162, | H0623: 1, H0494: 1, | | |
| | | | | | | Glu-169 to Gln-178, | L0769: 1 and S0152: 1. | | |
| | | | | | | Ser-208 to Thr-213, | | | |
| | | | | | | Arg-239 to Gly-247, | | | |
| | | | | | | Lys-253 to Leu-259, | | | |
| | | | | | | Glu-275 to Glu-281. | | | |
| 69 | HNTMB90 | 910934 | 79 | 3-533 | 363 | Pro-18 to Pro-27, | AR051: 2, AR050: 1, | | |
| | | | | | | Leu-34 to Lys-39, | AR054: 1, AR061: 1, | | |
| | | | | | | Lys-90 to Pro-95. | AR089: 1 | | |
| | | | | | | | H0519: 2, H0046: 1, | | |
| | | | | | | | L0803: 1, H0520: 1 and | | |
| | | | | | | | L0758: 1. | | |
| 70 | HMKCH92 | 910936 | 80 | 78-704 | 364 | Pro-32 to Glu-37, | AR089: 1, AR061: 1 | 3p26-p25 | 154705, |
| | | | | | | Gly-56 to Ser-61, | L0439: 4, H0392: 1 | | 193300, |
| | | | | | | Gly-144 to Arg-149, | and L0749: 1. | | 193300, |
| | | | | | | Glu-161 to Gty-168, | | | 227646, |
| | | | | | | Thr-182 to Lys-187. | | | 253260, |
| | | | | | | | | | 278720, |
| | | | | | | | | | 601154, |
| | | | | | | | | | 601253, |
| | | | | | | | | | 602011 |
| 71 | HTELV86 | 910946 | 81 | 1-927 | 365 | Thr-5 to Ser-11, | AR089: 7, AR061: 6 | | |
| | | | | | | Asp-78 to His-85, | H0616: 4, H0038: 1, | | |
| | | | | | | Ser-153 to Ser-162, | L0745: 1 and L0779: 1. | | |
| | | | | | | Glu-221 to Ala-234, | | | |
| | | | | | | Gly-247 to Glu-252. | | | |
| 72 | HNTAF23 | 910947 | 82 | 24-251 | 366 | His-1 to Gly-12, | AR089: 2, AR061: 1 | | |
| | | | | | | Trp-69 to Glu-75. | L0439: 4, S0192: 3, | | |
| | | | | | | | L0776: 2, L0438: 2, | | |
| | | | | | | | L0777: 2, H0254: 1, | | |
| | | | | | | | L0534: 1, H0333: 1, | | |
| | | | | | | | L0763: 1, H0519: 1, | | |
| | | | | | | | H0593: 1, L0750: 1, | | |
| | | | | | | | L0779: 1 and L0758: 1. | | |
| 73 | HELHP01 | 1137839 | 83 | 1-996 | 367 | Pro-3 to Glu-9, | AR061: 9, AR089: 9 | | |
| | | | | | | Ile-41 to Ile-49, | H0661: 1 and S0045: 1. | | |
| | | | | | | Thr-105 to Asp-110, | | | |
| | | | | | | Ser-161 to Gln-166, | | | |
| | | | | | | Thr-295 to Met-301, | | | |
| | | | | | | Glu-307 to Thr-315, | | | |
| | | | | | | Glu-324 to Ile-330. | | | |
| | | 916762 | 222 | 3-308 | 506 | Val-4 to Glu-11, | | | |
| | | | | | | Ile-43 to Ile-51. | | | |
| 74 | HTLGH72 | 1199896 | 84 | 40-783 | 368 | Pro-51 to Thr-57, | AR089: 15, AR061: 11 | | |
| | | | | | | Asn-66 to Val-71, | L0803: 16, S0358: 2, | | |
| | | | | | | Tyr-112 to Lys-119, | H0031: 2, S0144: 2, | | |
| | | | | | | Asn-153 to Arg-171, | L0770: 2, L0804: 2, | | |
| | | | | | | Ser-188 to Lys-194, | L0439: 2, L0780: 2, | | |
| | | | | | | Asp-207 to Thr-213, | S0116: 1, S0360: 1, | | |
| | | | | | | Tyr-216 to Gly-231. | H0441: 1, H0431: 1, | | |
| | | | | | | | H0331: 1, H0618: 1, | | |
| | | | | | | | H0544: 1, L0471: 1, | | |
| | | | | | | | H0510: 1, S0318: 1, | | |
| | | | | | | | H0264: 1, L0769: 1, | | |
| | | | | | | | L0783: 1, L0809: 1, | | |
| | | | | | | | L0790: 1, L0438: 1, | | |
| | | | | | | | L0355: 1, L0751: 1, | | |
| | | | | | | | L0779: 1, L0777: 1 and | | |
| | | | | | | | L0758: 1. | | |
| | | 917526 | 223 | 33-776 | 507 | | | | |
| 75 | HHEND45 | 1128226 | 85 | 2-196 | 369 | Gly-1 to Lys-7. | AR089: 4, AR061: 2 | | |
| | | | | | | | H0543: 2 | | |
| | | 919630 | 224 | 1-195 | 508 | Gly-1 to Lys-7. | | | |
| 76 | HMTAY52 | 1137641 | 86 | 825-1829 | 370 | Pro-2 to Arg-8, | AR089: 4, AR061: 2 | | |
| | | | | | | Leu-32 to Glu-39, | L0748: 4, L0758: 4, | | |
| | | | | | | Ser-51 to Trp-91, | H0457: 3, L0754: 3, | | |
| | | | | | | Pro-239 to Arg-246, | S0418: 2, H0253: 2, | | |
| | | | | | | Ser-254 to Ser-263, | H0052: 2, S0116: 1, | | |
| | | | | | | Tyr-283 to Ala-290, | S0356: 1, S0278: 1, | | |
| | | | | | | Glu-299 to Thr-309. | H0261: 1, S0222: 1, | | |
| | | | | | | | H0370: 1, H0486: 1, | | |
| | | | | | | | T0082: 1, S0474: 1, | | |
| | | | | | | | H0057: 1, S0050: 1, | | |
| | | | | | | | H0594: 1, H0213: 1, | | |
| | | | | | | | H0553: 1, H0628: 1, | | |
| | | | | | | | H0617: 1, H0040: 1, | | |
| | | | | | | | H0100: 1, H0494: 1, | | |
| | | | | | | | H0207: 1, H0633: 1, | | |
| | | | | | | | L0763: 1, L0770: 1, | | |
| | | | | | | | L0769: 1, L0796: 1, | | |
| | | | | | | | L0642: 1, L0806: 1, | | |
| | | | | | | | L0805: 1, L0789: 1, | | |
| | | | | | | | L0665: 1, S0052: 1, | | |
| | | | | | | | H0144: 1, H0539: 1, | | |
| | | | | | | | H0518: 1, S0152: 1, | | |
| | | | | | | | L0749: 1, L0750: 1, | | |
| | | | | | | | L0777: 1, L0752: 1, | | |
| | | | | | | | L0601: 1, S0192: 1, | | |
| | | | | | | | S0194: 1 and H0506: 1. | | |
| | | 921948 | 225 | 107-892 | 509 | Gln-8 to Ser-16. | | | |
| 77 | HUCPS03 | 1158484 | 87 | 2-832 | 371 | Asp-7 to Lys-14, | AR061: 9, AR089: 8 | | |
| | | | | | | Arg-36 to Gln-41, | S0420: 2, S0212: 1, | | |
| | | | | | | Arg-55 to Cys-61, | H0125: 1, S0356: 1, | | |
| | | | | | | Tyr-91 to Lys-99, | H0486: 1, T0010: 1, | | |
| | | | | | | Leu-125 to Ile-130, | H0412: 1, H0059: 1, | | |
| | | | | | | Gln-192 to Leu-202, | H0691: 1, L0438: 1, | | |
| | | | | | | Thr-222 to Arg-228, | S0126: 1 and L0748: 1. | | |
| | | | | | | Arg-236 to Pro-250. | | | |
| | | 922118 | 226 | 2-1120 | 510 | Asp-7 to Lys-14, | | | |
| | | | | | | Arg-36 to Gln-41, | | | |
| | | | | | | Arg-55 to Cys-61, | | | |
| | | | | | | Tyr-91 to Lys-99, | | | |
| | | | | | | Leu-125 to Ile-130, | | | |
| | | | | | | Gln-192 to Leu-202, | | | |
| | | | | | | Thr-222 to Arg-228, | | | |
| | | | | | | Arg-236 to Arg-251, | | | |
| | | | | | | Glu-262 to Leu-269, | | | |
| | | | | | | Pro-284 to Asn-317, | | | |
| | | | | | | Pro-330 to Leu-349, | | | |
| | | | | | | Arg-358 to Tyr-372. | | | |
| 78 | HNHNP81 | 928378 | 88 | 143-514 | 372 | Ile-1 to Ser-16. | AR051: 23, AR054: | | |
| | | | | | | | 11, AR050: 9, AR061: | | |
| | | | | | | | 8, AR089: 5 | | |
| | | | | | | | S0216: 1 | | |
| 79 | HFIDL68 | 928475 | 89 | 2-529 | 373 | Glu-40 to Lys-46, | AR089: 7, AR061: 4, | | |
| | | | | | | Phe-120 to Ser-132. | AR050: 2, AR054: 2, | | |
| | | | | | | | AR051: 1 | | |
| | | | | | | | S0192: 1 | | |
| 80 | HTLAB16 | 1144562 | 90 | 1042-116 | 374 | Arg-34 to Glu-39, | AR061: 5, AR089: 1 | | |
| | | | | | | Pro-46 to Val-53, | H0253: 11, L0439: 6, | | |
| | | | | | | Pro-128 to Lys-136, | L0794: 4, L0809: 4, | | |
| | | | | | | Leu-147 to Lys-169, | L0758: 4, H0618: 3, | | |
| | | | | | | Phe-173 to Cys-179, | L0766: 3, H0393: 2, | | |
| | | | | | | Ser-186 to Ser-192, | L0803: 2, L0783: 2, | | |
| | | | | | | Ser-201 to Arg-211, | L0438: 2, H0341: 1, | | |
| | | | | | | Gly-231 to Lys-237, | S0420: 1, S0358: 1, | | |
| | | | | | | Leu-243 to Gly-248, | S0362: 1, H0510: 1, | | |
| | | | | | | Ala-256 to Lys-270. | H0181: 1, L0769: 1, | | |
| | | | | | | | L0542: 1, L0789: 1, | | |
| | | | | | | | H0187: 1, L0743: 1, | | |
| | | | | | | | L0779: 1 and L0777: 1. | | |
| | | 929948 | 227 | 1-960 | 511 | | | | |
| 81 | HOEEU57 | 1158765 | 91 | 2-481 | 375 | Gly-1 to Ser-6. | AR089: 30, AR061: 7 | | |
| | | | | | | | L0774: 1, S0126: 1 and | | |
| | | | | | | | L0780: 1. | | |
| | | 932562 | 228 | 1-738 | 512 | Gly-1 to Arg-15. | | | |
| 82 | HNHCP79 | 565781 | 92 | 23-301 | 376 | Gly-16 to Asn-21. | AR051: 9, AR054: 9, | | |
| | | | | | | | AR050: 7, AR061: 3, | | |
| | | | | | | | AR089: 2 | | |
| | | | | | | | H0271: 26, H0521: 26, | | |
| | | | | | | | H0046: 20, L0747: 20, | | |
| | | | | | | | S0278: 14, S0052: 14, | | |
| | | | | | | | L0754: 12, L0599: 12, | | |
| | | | | | | | S0142: 11, S0428: 11, | | |
| | | | | | | | H0179: 10, S0344: 10, | | |
| | | | | | | | L0776: 9, H0638: 8, | | |
| | | | | | | | L0771: 8, L0666: 8, | | |
| | | | | | | | S0360: 7, S0144: 7, | | |
| | | | | | | | L0775: 7, L0659: 7, | | |
| | | | | | | | H0422: 7, S0354: 6, | | |
| | | | | | | | H0580: 6, H0622: 6, | | |
| | | | | | | | H0641: 6, H0522: 6, | | |
| | | | | | | | L0740: 6, L0595: 6, | | |
| | | | | | | | H0581: 5, H0416: 5, | | |
| | | | | | | | H0673: 5, L0598: 5, | | |
| | | | | | | | L0774: 5, S3014: 5, | | |
| | | | | | | | L0777: 5, L0759: 5, | | |
| | | | | | | | L0362: 5, H0423: 5, | | |
| | | | | | | | H0069: 4, H0674: 4, | | |
| | | | | | | | L0770: 4, L0769: 4, | | |
| | | | | | | | L0750: 4, L0752: 4, | | |
| | | | | | | | L0731: 4, L0757: 4, | | |
| | | | | | | | L0603: 4, S0114: 3, | | |
| | | | | | | | S0134: 3, S0116: 3, | | |
| | | | | | | | H0341: 3, S0418: 3, | | |
| | | | | | | | S0358: 3, H0545: 3, | | |
| | | | | | | | H0050: 3, H0646: 3, | | |
| | | | | | | | L0768: 3, L0664: 3, | | |
| | | | | | | | S0053: 3, S0216: 3, | | |
| | | | | | | | S0374: 3, S0404: 3, | | |
| | | | | | | | S0206: 3, L0745: 3, | | |
| | | | | | | | L0756: 3, L0581: 3, | | |
| | | | | | | | H0170: 2, H0222: 2, | | |
| | | | | | | | L0785: 2, H0663: 2, | | |
| | | | | | | | S0376: 2, S0132: 2, | | |
| | | | | | | | S0222: 2, H0370: 2, | | |
| | | | | | | | H0486: 2, H0013: 2, | | |
| | | | | | | | H0635: 2, S0280: 2, | | |
| | | | | | | | H0575: 2, H0036: 2, | | |
| | | | | | | | H0618: 2, H0597: 2, | | |
| | | | | | | | H0014: 2, H0039: 2, | | |
| | | | | | | | L0142: 2, H0551: 2, | | |
| | | | | | | | H0056: 2, H0561: 2, | | |
| | | | | | | | S0426: 2, L0763: 2, | | |
| | | | | | | | L0761: 2, L0648: 2, | | |
| | | | | | | | L0662: 2, L0767: 2, | | |
| | | | | | | | L0655: 2, L0519: 2, | | |
| | | | | | | | L0665: 2, H0519: 2, | | |
| | | | | | | | H0435: 2, H0696: 2, | | |
| | | | | | | | S0027: 2, L0743: 2, | | |
| | | | | | | | L0751: 2, S0031: 2, | | |
| | | | | | | | S0260: 2, H0445: 2, | | |
| | | | | | | | S0434: 2, L0590: 2, | | |
| | | | | | | | S0276: 2, H0395: 1, | | |
| | | | | | | | H0556: 1, T0002: 1, | | |
| | | | | | | | H0685: 1, S0040: 1, | | |
| | | | | | | | H0294: 1, S0218: 1, | | |
| | | | | | | | S0001: 1, H0484: 1, | | |
| | | | | | | | H0483: 1, H0662: 1, | | |
| | | | | | | | H0176: 1, H0589: 1, | | |
| | | | | | | | H0459: 1, S0356: 1, | | |
| | | | | | | | S0408: 1, S0410: 1, | | |
| | | | | | | | L0717: 1, H0411: 1, | | |
| | | | | | | | H0549: 1, H0550: 1, | | |
| | | | | | | | H0431: 1, H0608: 1, | | |
| | | | | | | | H0409: 1, H0404: 1, | | |
| | | | | | | | H0587: 1, H0485: 1, | | |
| | | | | | | | H0250: 1, L0021: 1, | | |
| | | | | | | | H0590: 1, H0318: 1, | | |
| | | | | | | | T0071: 1, H0421: 1, | | |
| | | | | | | | H0263: 1, H0596: 1, | | |
| | | | | | | | H0150: 1, H0009: 1, | | |
| | | | | | | | L0471: 1, H0011: 1, | | |
| | | | | | | | S0051: 1, H0083: 1, | | |
| | | | | | | | H0510: 1, H0594: 1, | | |
| | | | | | | | S0318: 1, H0687: 1, | | |
| | | | | | | | H0286: 1, S0250: 1, | | |
| | | | | | | | H0328: 1, H0553: 1, | | |
| | | | | | | | L0055: 1, H0032: 1, | | |
| | | | | | | | H0169: 1, H0316: 1, | | |
| | | | | | | | H0135: 1, H0090: 1, | | |
| | | | | | | | H0591: 1, H0634: 1, | | |
| | | | | | | | H0413: 1, H0623: 1, | | |
| | | | | | | | H0059: 1, T0069: 1, | | |
| | | | | | | | S0038: 1, H0100: 1, | | |
| | | | | | | | T0041: 1, H0509: 1, | | |
| | | | | | | | S0150: 1, H0633: 1, | | |
| | | | | | | | S0002: 1, H0529: 1, | | |
| | | | | | | | L0762: 1, L0667: 1, | | |
| | | | | | | | L0772: 1, L0646: 1, | | |
| | | | | | | | L0643: 1, L0521: 1, | | |
| | | | | | | | L0766: 1, L0389: 1, | | |
| | | | | | | | L0653: 1, L0629: 1, | | |
| | | | | | | | L0527: 1, L0657: 1, | | |
| | | | | | | | L0517: 1, L0384: 1, | | |
| | | | | | | | L0809: 1, L0663: 1, | | |
| | | | | | | | H0144: 1, H0697: 1, | | |
| | | | | | | | S0126: 1, H0690: 1, | | |
| | | | | | | | H0670: 1, H0648: 1, | | |
| | | | | | | | S0378: 1, S0380: 1, | | |
| | | | | | | | H0518: 1, S0152: 1, | | |
| | | | | | | | S0013: 1, S0044: 1, | | |
| | | | | | | | H0214: 1, H0555: 1, | | |
| | | | | | | | H0436: 1, H0478: 1, | | |
| | | | | | | | S0432: 1, S3012: 1, | | |
| | | | | | | | S0032: 1, L0744: 1, | | |
| | | | | | | | L0439: 1, L0779: 1, | | |
| | | | | | | | L0758: 1, S0308: 1, | | |
| | | | | | | | S0436: 1, L0591: 1, | | |
| | | | | | | | L0593: 1, S0011: 1, | | |
| | | | | | | | H0543: 1 and S0458: 1. | | |
| | | 775293 | 229 | 138-275 | 513 | | | | |
| | | 941862 | 230 | 2-748 | 514 | | | | |
| 83 | HHSDL85 | 942246 | 93 | 2-502 | 377 | Ser-12 to Gln-25, | AR061: 3, AR089: 2 | | |
| | | | | | | Pro-29 to Phe-39, | S0007: 3, S0001: 1, | | |
| | | | | | | Gly-81 to Gly-89, | H0618: 1, H0009: 1, | | |
| | | | | | | Glu-143 to Trp-156. | S0051: 1, L0763: 1, | | |
| | | | | | | | L0439: 1 and L0758: 1. | | |
| | | 951168 | 231 | 356-42 | 515 | Arg-82 to Trp-88. | | | |
| 84 | HWADD57 | 943039 | 94 | 2-1009 | 378 | Asp-2 to Pro-7, | AR089: 1, AR061: 0 | | |
| | | | | | | Leu-18 to Arg-27, | H0255: 2, H0486: 1, | | |
| | | | | | | Glu-52 to Ser-59, | H0581: 1, H0529: 1 and | | |
| | | | | | | Pro-90 to Pro-97, | H0543: 1. | | |
| | | | | | | Pro-116 to Glu-121. | | | |
| 85 | HFKKN77 | 943757 | 95 | 145-684 | 379 | Thr-9 to Val-16. | AR061: 6, AR089: 2 | | |
| | | | | | | | H0620: 2, H0024: 2, | | |
| | | | | | | | H0208: 1, S0222: 1, | | |
| | | | | | | | H0194: 1, H0123: 1, | | |
| | | | | | | | H0051: 1 and S0052: 1. | | |
| 86 | HBGMZ39 | 947112 | 96 | 575-3 | 380 | Arg-37 to Phe-48, | AR089: 15, AR061: 10 | | |
| | | | | | | Asp-55 to Asp-63, | H0617: 8, L0763: 2, | | |
| | | | | | | Gly-73 to Ala-80, | L0754: 2, H0483: 1 and | | |
| | | | | | | Gln-147 to Trp-154, | L0743: 1. | | |
| | | | | | | Val-176 to Lys-191. | | | |
| 87 | HTTCB17 | 1180942 | 97 | 1-1977 | 381 | Gly-1 to Thr-7, | AR061: 7, AR089: 4 | | |
| | | | | | | Trp-35 to Gly-66, | L0766: 8, L0748: 7, | | |
| | | | | | | Lys-118 to Tyr-124, | H0038: 4, H0543: 4, | | |
| | | | | | | Glu-159 to Glu-166, | L0779: 3, H0624: 2, | | |
| | | | | | | Val-168 to Lys-181, | S0007: 2, H0083: 2, | | |
| | | | | | | Pro-273 to Asp-280, | L0805: 2, L0666: 2, | | |
| | | | | | | Gln-288 to Ile-293, | H0547: 2, L0439: 2, | | |
| | | | | | | Pro-319 to Trp-329, | L0777: 2, L0758: 2, | | |
| | | | | | | Thr-332 to Ala-337, | L0596: 2, L0599: 2, | | |
| | | | | | | Arg-344 to Leu-364, | S0026: 2, H0657: 1, | | |
| | | | | | | Gly-413 to Ala-426, | S0212: 1, H0255: 1, | | |
| | | | | | | Ser-453 to Ser-467, | S0420: 1, S0358: 1, | | |
| | | | | | | Asn-469 to Thr-481, | S0444: 1, S0360: 1, | | |
| | | | | | | Asn-506 to Leu-512, | H0431: 1, S0414: 1, | | |
| | | | | | | Thr-520 to Lys-526, | H0004: 1, S0010: 1, | | |
| | | | | | | Asp-535 to Val-548, | H0597: 1, H0546: 1, | | |
| | | | | | | Asn-566 to Lys-574, | H0354: 1, H0266: 1 | | |
| | | | | | | Gly-596 to Thr-601, | H0383: 1, H0361: 1, | | |
| | | | | | | Tyr-621 to Tyr-627. | H0040: 1, H0616: 1, | | |
| | | | | | | | L0151: 1, H0264: 1, | | |
| | | | | | | | H0560: 1, L0520: 1, | | |
| | | | | | | | L0640: 1, L0638: 1, | | |
| | | | | | | | L0794: 1, L0803: 1, | | |
| | | | | | | | L0375: 1, L0806: 1, | | |
| | | | | | | | L0655: 1, L0663: 1, | | |
| | | | | | | | H0520: 1, H0519: 1, | | |
| | | | | | | | H0670: 1, H0672: 1, | | |
| | | | | | | | S0146: 1, H0555: 1, | | |
| | | | | | | | L0752: 1, L0731: 1, | | |
| | | | | | | | L0759: 1, S0031: 1 | | |
| | | | | | | | H0445: 1, L0595: 1 and | | |
| | | | | | | | L0366: 1. | | |
| | | 948595 | 232 | 2942-909 | 516 | Ala-1 to Gly-12. | | | |
| 88 | HEQAP17 | 949358 | 98 | 819-295 | 382 | | AR051: 744, AR054: | | |
| | | | | | | | 681, AR050: 564, | | |
| | | | | | | | AR061: 2, AR089: 1 | | |
| | | | | | | | S0192: 3, H0544: 1, | | |
| | | | | | | | L0766: 1, L0804: 1, | | |
| | | | | | | | H0521: 1 and L0747: 1. | | |
| 89 | H2LAD53 | 952181 | 99 | 1-360 | 383 | Glu-1 to Tyr-10, | AR089: 18, AR061: 13 | | |
| | | | | | | Lys-37 to Leu-44, | S0136: 47, L0769: 10, | | |
| | | | | | | Glu-66 to Leu-75, | L0439: 7, L0750: 7, | | |
| | | | | | | Glu-80 to His-91. | H0620: 5, L0776: 5, | | |
| | | | | | | | L0740: 5, L0752: 5, | | |
| | | | | | | | L0509: 4, L0809: 4, | | |
| | | | | | | | L0666: 4, L0748: 4, | | |
| | | | | | | | H0624: 3, H0265: 3, | | |
| | | | | | | | H0341: 3, S0418: 3, | | |
| | | | | | | | L0717: 3, L0764: 3, | | |
| | | | | | | | L0659: 3, L0755: 3, | | |
| | | | | | | | S0026: 3, H0556: 2, | | |
| | | | | | | | S0356: 2, S0358: 2, | | |
| | | | | | | | S0360: 2, H0574: 2, | | |
| | | | | | | | T0060: 2, S0010: 2, | | |
| | | | | | | | H0046: 2, H0510: 2, | | |
| | | | | | | | H0032: 2, H0169: 2, | | |
| | | | | | | | H0413: 2, H0646: 2, | | |
| | | | | | | | L0646: 2, L0766: 2, | | |
| | | | | | | | L0803: 2, L0805: 2, | | |
| | | | | | | | L0665: 2, S0374: 2, | | |
| | | | | | | | H0519: 2, H0659: 2, | | |
| | | | | | | | H0648: 2, S0328: 2, | | |
| | | | | | | | S0378: 2, S0380: 2, | | |
| | | | | | | | S3014: 2, L0756: 2, | | |
| | | | | | | | L0777: 2, L0731: 2, | | |
| | | | | | | | L0758: 2, L0588: 2, | | |
| | | | | | | | L0589: 2, L0594: 2, | | |
| | | | | | | | H0543: 2, H0171: 1, | | |
| | | | | | | | S0040: 1, T0049: 1, | | |
| | | | | | | | L0002: 1, H0657: 1, | | |
| | | | | | | | H0346: 1, H0255: 1, | | |
| | | | | | | | H0664: 1, H0305: 1, | | |
| | | | | | | | H0589: 1, S0376: 1, | | |
| | | | | | | | H0675: 1, S0045: 1, | | |
| | | | | | | | S0046: 1, H0586: 1, | | |
| | | | | | | | H0587: 1, H0333: 1, | | |
| | | | | | | | H0642: 1, H0331: 1, | | |
| | | | | | | | H0632: 1, H0486: 1, | | |
| | | | | | | | H0013: 1, H0427: 1, | | |
| | | | | | | | L0021: 1, H0575: 1, | | |
| | | | | | | | H0590: 1, S0182: 1, | | |
| | | | | | | | H0085: 1, H0596: 1, | | |
| | | | | | | | H0546: 1, L0157: 1, | | |
| | | | | | | | H0572: 1, H0571: 1, | | |
| | | | | | | | H0024: 1, L0695: 1, | | |
| | | | | | | | H0373: 1, L0163: 1, | | |
| | | | | | | | S6028: 1, H0266: 1, | | |
| | | | | | | | S0003: 1, H0252: 1, | | |
| | | | | | | | T0006: 1, H0166: 1, | | |
| | | | | | | | H0674: 1, S0364: 1, | | |
| | | | | | | | L0455: 1, H0124: 1, | | |
| | | | | | | | H0598: 1, H0400: 1, | | |
| | | | | | | | H0135: 1, H0163: 1, | | |
| | | | | | | | H0038: 1, H0616: 1, | | |
| | | | | | | | H0551: 1, T0067: 1, | | |
| | | | | | | | H0100: 1, T0041: 1, | | |
| | | | | | | | S0448: 1, S0450: 1, | | |
| | | | | | | | H0509: 1, H0647: 1, | | |
| | | | | | | | S0208: 1, L0770: 1, | | |
| | | | | | | | L0637: 1, L0772: 1, | | |
| | | | | | | | L0372: 1, L0800: 1, | | |
| | | | | | | | L0374: 1, L0662: 1, | | |
| | | | | | | | L0388: 1, L0774: 1, | | |
| | | | | | | | L0775: 1, L0375: 1, | | |
| | | | | | | | L0653: 1, L0628: 1, | | |
| | | | | | | | L0513: 1, L0526: 1, | | |
| | | | | | | | L0518: 1, L0382: 1, | | |
| | | | | | | | L0663: 1, L0664: 1, | | |
| | | | | | | | L0565: 1, L0438: 1, | | |
| | | | | | | | H0660: 1, H0666: 1, | | |
| | | | | | | | S0044: 1, S0037: 1, | | |
| | | | | | | | S0206: 1, L0747: 1, | | |
| | | | | | | | L0780: 1, L0753: 1, | | |
| | | | | | | | L0757: 1, L0759: 1, | | |
| | | | | | | | H0445: 1, L0592: 1, | | |
| | | | | | | | L0485: 1, L0608: 1, | | |
| | | | | | | | L0603: 1, L0097: 1 and | | |
| | | | | | | | S0446: 1. | | |
| | | 972357 | 233 | 672-887 | 517 | Glu-42 to Val-48, | | | |
| | | | | | | Glu-63 to Asp-72. | | | |
| | | 972358 | 234 | 848-645 | 518 | | | | |
| 90 | HAMFD12 | 1149676 | 100 | 3-2033 | 384 | Tyr-41 to Leu-52, | AR089: 3, AR061: 1 | | |
| | | | | | | Leu-64 to Cys-72, | H0271: 10, H0052: 8, | | |
| | | | | | | Pro-92 to Arg-98, | H0556: 7, L0439: 7, | | |
| | | | | | | Ser-110 to Glu-116, | L0754: 7, H0622: 6, | | |
| | | | | | | Ala-149 to Thr-157, | L0776: 5, L0769: 4, | | |
| | | | | | | Glu-173 to Pro-178, | H0265: 3, H0295: 3, | | |
| | | | | | | Pro-196 to Pro-204, | H0580: 3, S0222: 3, | | |
| | | | | | | Gly-233 to Pro-239, | H0013: 3, H0156: 3, | | |
| | | | | | | Trp-274 to Lys-282, | H0051: 3, H0494: 3, | | |
| | | | | | | Gly-309 to Arg-318, | L0659: 3, S0356: 2, | | |
| | | | | | | Lys-357 to Phe-368, | H0208: 2, S6014: 2, | | |
| | | | | | | Asp-380 to Ser-385, | H0135: 2, H0634: 2, | | |
| | | | | | | Asn-405 to Glu-415, | S0002: 2, S0426: 2, | | |
| | | | | | | Glu-452 to Glu-457, | L0770: 2, L0796: 2, | | |
| | | | | | | Leu-492 to Asn-499, | L0373: 2, L0803: 2, | | |
| | | | | | | Glu-505 to Asn-520, | L0375: 2, L0655: 2, | | |
| | | | | | | Arg-526 to Ser-534, | L0666: 2, L0438: 2, | | |
| | | | | | | Ser-540 to Asp-549, | H0672: 2, H0521: 2, | | |
| | | | | | | Glu-588 to Phe-597, | L0747: 2, L0750: 2, | | |
| | | | | | | Ser-600 to Thr-608, | L0756: 2, L0588: 2, | | |
| | | | | | | Ser-616 to Ser-621, | H0542: 2, H0543: 2, | | |
| | | | | | | Arg-632 to Val-638, | H0170: 1, S0212: 1, | | |
| | | | | | | Tyr-651 to Gly-656. | S0282: 1, S0030: 1, | | |
| | | | | | | | H0305: 1, H0589: 1, | | |
| | | | | | | | L0619: 1, H0619: 1, | | |
| | | | | | | | S6026: 1, H0550: 1, | | |
| | | | | | | | H0370: 1, H0600: 1, | | |
| | | | | | | | H0592: 1, H0486: 1, | | |
| | | | | | | | T0040: 1, H0635: 1, | | |
| | | | | | | | H0002: 1, S0010: 1, | | |
| | | | | | | | H0390: 1, H0581: 1, | | |
| | | | | | | | H0421: 1, H0085: 1, | | |
| | | | | | | | T0110: 1, H0041: 1, | | |
| | | | | | | | N0006: 1, H0050: 1, | | |
| | | | | | | | H0012: 1, H0620: 1, | | |
| | | | | | | | T0003: 1, H0024: 1, | | |
| | | | | | | | H0687: 1, H0252: 1, | | |
| | | | | | | | H0604: 1, H0031: 1, | | |
| | | | | | | | H0644: 1, H0628: 1, | | |
| | | | | | | | H0598: 1, H0087: 1, | | |
| | | | | | | | H0264: 1, S0112: 1, | | |
| | | | | | | | T0041: 1, H0560: 1, | | |
| | | | | | | | S0150: 1, H0529: 1, | | |
| | | | | | | | L0640: 1, L0761: 1, | | |
| | | | | | | | L0643: 1, L0806: 1, | | |
| | | | | | | | L0658: 1, L0809: 1, | | |
| | | | | | | | L0544: 1, L0788: 1, | | |
| | | | | | | | L0663: 1, L0664: 1, | | |
| | | | | | | | L0665: 1, S0428: 1, | | |
| | | | | | | | S0053: 1, H0144: 1, | | |
| | | | | | | | H0690: 1, H0518: 1, | | |
| | | | | | | | H0696: 1, H0436: 1, | | |
| | | | | | | | H0576: 1, S0392: 1, | | |
| | | | | | | | L0740: 1, L0731: 1, | | |
| | | | | | | | L0759: 1, S0031: 1, | | |
| | | | | | | | L0596: 1, S0011: 1, | | |
| | | | | | | | H0667: 1 and S0192: 1. | | |
| | | 952438 | 235 | 3-539 | 519 | Tyr-41 to Leu-52, | | | |
| | | | | | | Leu-64 to Cys-72, | | | |
| | | | | | | Pro-92 to Arg-98, | | | |
| | | | | | | Ser-110 to Glu-116. | | | |
| 91 | HE2SY09 | 1186416 | 101 | 2-778 | 385 | Asp-1 to Glu-11, | AR061: 1, AR089: 1 | | |
| | | | | | | Arg-23 to Ala-31, | H0521: 3, H0624: 1, | | |
| | | | | | | Asp-33 to Lys-39, | H0650: 1, S0001: 1, | | |
| | | | | | | Ser-66 to Gln-74, | H0437: 1, H0052: 1, | | |
| | | | | | | Leu-102 to Pro-107, | H0056: 1, H0519: 1, | | |
| | | | | | | Lys-198 to Phe-204. | S0028: 1 and S0031: 1. | | |
| | | 953828 | 236 | 2-646 | 520 | Asp-1 to Glu-11, | | | |
| | | | | | | Arg-23 to Asp-29. | | | |
| 92 | HWLLB11 | 954849 | 102 | 51-524 | 386 | Pro-1 to Glu-10, | AR061: 2, AR089: 2 | | |
| | | | | | | His-60 to Arg-76, | S0358: 2, L0657: 1 and | | |
| | | | | | | Pro-79 to Arg-85, | L0601: 1. | | |
| | | | | | | Ala-95 to Ile-101, | | | |
| | | | | | | Glu-124 to Glu-130, | | | |
| | | | | | | Lys-151 to Arg-158. | | | |
| 93 | HNTEF53 | 954852 | 103 | 33-938 | 387 | Pro-45 to Ser-53, | AR089: 2, AR061: 1 | | |
| | | | | | | Ala-55 to Ala-63, | L0439: 4, L0105: 2, | | |
| | | | | | | Asp-130 to Leu-136. | H0271: 2, L0637: 2, | | |
| | | | | | | | L0653: 2, H0519: 2, | | |
| | | | | | | | S0330: 2, H0431: 1, | | |
| | | | | | | | H0052: 1, L0471: 1, | | |
| | | | | | | | H0375: 1, L0763: 1, | | |
| | | | | | | | L0794: 1, L0803: 1, | | |
| | | | | | | | L0774: 1, L0806: 1, | | |
| | | | | | | | L0526: 1, L0809: 1, | | |
| | | | | | | | L0666: 1, L0664: 1 and | | |
| | | | | | | | H0648: 1. | | |
| 94 | HNTND64 | 954871 | 104 | 1-264 | 388 | Gln-34 to Glu-42. | AR089: 8, AR061: 5 | | |
| | | | | | | | S0040: 1, H0083: 1 and | | |
| | | | | | | | H0520: 1. | | |
| 95 | HFPFA83 | 955614 | 105 | 187-735 | 389 | Thr-9 to Val-16. | AR054: 375, AR051: | | |
| | | | | | | | 284, AR050: 235, | | |
| | | | | | | | AR061: 96, AR089: 33 | | |
| | | | | | | | H0620: 2, H0024: 2, | | |
| | | | | | | | H0208: 1, S0222: 1, | | |
| | | | | | | | H0194: 1, H0123: 1, | | |
| | | | | | | | H0051: 1 and S0052: 1. | | |
| 96 | HHAWC08 | 957942 | 106 | 172-1047 | 390 | Pro-14 to Gly-32, | AR061: 0, AR089: 0 | | |
| | | | | | | Pro-73 to Glu-83, | H0052: 2, L0439: 2, | | |
| | | | | | | Phe-92 to Ser-100, | S0418: 1, H0619: 1, | | |
| | | | | | | Glu-141 to Asp-148, | S0280: 1 and L0438: 1. | | |
| | | | | | | Thr-159 to Gln-166, | | | |
| | | | | | | Asp-198 to Pro-204, | | | |
| | | | | | | Thr-242 to Val-248. | | | |
| 97 | HBWBF71 | 1189778 | 107 | 2-436 | 391 | | AR089: 20, AR061: 2 | | |
| | | | | | | | S0386: 1 and H0543: 1. | | |
| | | 963713 | 237 | 2-577 | 521 | Gly-77 to Leu-82, | | | |
| | | | | | | Ser-88 to Gly-107. | | | |
| 98 | HTLIT03 | 1152266 | 108 | 3-947 | 392 | Gly-9 to Gln-17, | AR061: 11, AR089: 5 | | |
| | | | | | | His-45 to Asp-51, | H0457: 10, H0253: 7, | | |
| | | | | | | Tyr-96 to Lys-104, | H0618: 5, L0768: 2, | | |
| | | | | | | Glu-113 to Gly-120, | L0748: 2, H0657: 1, | | |
| | | | | | | Glu-143 to Asp-150, | S0300: 1, H0550: 1, | | |
| | | | | | | Lys-159 to Asp-170, | L0021: 1, H0581: 1, | | |
| | | | | | | Thr-212 to Asp-218, | H0617: 1, H0606: 1, | | |
| | | | | | | Glu-229 to Ala-244, | H0316: 1, H0038: 1, | | |
| | | | | | | Arg-262 to Glu-289, | H0616: 1, H0334: 1, | | |
| | | | | | | Gly-307 to Leu-312. | L0761: 1, L0764: 1, | | |
| | | | | | | | L0774: 1, L0659: 1, | | |
| | | | | | | | H0519: 1, H0704: 1, | | |
| | | | | | | | L0755: 1, L0758: 1, | | |
| | | | | | | | L0361: 1 and H0543: 1. | | |
| | | 966870 | 238 | 2-823 | 522 | His-1 to Asp-7, | | | |
| | | | | | | Asp-56 to Tyr-64. | | | |
| 99 | HSLFH12 | 970661 | 109 | 126-431 | 393 | Lys-1 to Gly-10, | AR061: 1, AR089: 0 | | |
| | | | | | | Glu-23 to Asn-30, | S0132: 1 and S0028: 1. | | |
| | | | | | | Glu-51 to Lys-62, | | | |
| | | | | | | Asn-89 to Arg-95, | | | |
| | | | | | | Ser-97 to Arg-102. | | | |
| 100 | HE8NI24 | 971296 | 110 | 318-749 | 394 | | AR050: 3, AR051: 1, | | |
| | | | | | | | AR089: 0, AR061: 0 | | |
| | | | | | | | H0013: 3, L0794: 2, | | |
| | | | | | | | L0439: 2, L0756: 2, | | |
| | | | | | | | L0779: 2, L0758: 2, | | |
| | | | | | | | S0001: 1, H0619: 1, | | |
| | | | | | | | L0638: 1, L0641: 1, | | |
| | | | | | | | L0776: 1 and H0435: 1. | | |
| 101 | HMTAX31 | 1154339 | 111 | 97-666 | 395 | Lys-24 to Lys-36, | AR050: 40, AR051: | | |
| | | | | | | Asp-63 to Thr-70, | 39, AR054: 37, AR089: | | |
| | | | | | | Arg-139 to Lys-146, | 5, AR061: 1 | | |
| | | | | | | Leu-156 to Ala-171. | L0777: 4, S0358: 2, | | |
| | | | | | | | S0126: 2, H0522: 2, | | |
| | | | | | | | S0116: 1, H0638: 1, | | |
| | | | | | | | H0443: 1, H0014: 1, | | |
| | | | | | | | H0379: 1, S0016: 1, | | |
| | | | | | | | S0374: 1, H0518: 1, | | |
| | | | | | | | H0521: 1 and L0740: 1. | | |
| | | 971343 | 239 | 1091-522 | 523 | Lys-24 to Lys-36, | | | |
| | | | | | | Asp-63 to Thr-70, | | | |
| | | | | | | Arg-139 to Lys-146, | | | |
| | | | | | | Leu-156 to Ala-171. | | | |
| 102 | HE8UY87 | 1171975 | 112 | 1-330 | 396 | Gly-1 to Gln-13, | AR061: 8, AR089: 2 | | |
| | | | | | | Ala-16 to Phe-22, | H0013: 1 | | |
| | | | | | | Glu-42 to Tyr-48, | | | |
| | | | | | | Lys-75 to Leu-82, | | | |
| | | | | | | Gln-103 to Ala-110. | | | |
| | | 972359 | 240 | 3-494 | 524 | Pro-1 to Gln-10, | | | |
| | | | | | | Ala-13 to Phe-19, | | | |
| | | | | | | Glu-39 to Tyr-45, | | | |
| | | | | | | Lys-72 to Leu-79, | | | |
| | | | | | | Glu-101 to Leu-110, | | | |
| | | | | | | Glu-115 to His-126, | | | |
| | | | | | | Leu-151 to Gln-156. | | | |
| 103 | HTPDV62 | 1138729 | 113 | 2-412 | 397 | Arg-117 to Trp-122, | AR061: 7, AR089: 4 | | |
| | | | | | | Pro-124 to Thr-137. | H0663: 2, H0069: 2, | | |
| | | | | | | | H0634: 2, H0635: 1, | | |
| | | | | | | | H0618: 1 and H0039: 1. | | |
| | | 418671 | 241 | 2-358 | 525 | | | | |
| 104 | HMUBV12 | 1227616 | 114 | 1-1398 | 398 | Pro-16 to Trp-21, | AR061: 2, AR089: 2 | | |
| | | | | | | Gly-33 to Ser-42, | L0592: 2, H0013: 1, | | |
| | | | | | | Gln-74 to Pro-79, | H0178: 1, H0099: 1, | | |
| | | | | | | Gly-186 to Ala-193, | H0032: 1, H0529: 1, | | |
| | | | | | | Leu-209 to Lys-217, | L0772: 1, H0521: 1 and | | |
| | | | | | | Pro-252 to Gly-257, | L0780: 1. | | |
| | | | | | | Ala-262 to Arg-268, | | | |
| | | | | | | Ser-406 to Gln-423, | | | |
| | | | | | | Thr-454 to Glu-464. | | | |
| | | 549423 | 242 | 64-306 | 526 | | | | |
| 105 | HMIAH32 | 1171989 | 115 | 49-714 | 399 | His-15 to Ser-21, | AR061: 7, AR089: 2 | | |
| | | | | | | Asp-44 to Val-65, | S6028: 2, L0766: 2, | | |
| | | | | | | Glu-95 to Thr-101, | L0777: 2, L0752: 2, | | |
| | | | | | | Ala-131 to Lys-149, | H0663: 1, H0696: 1 and | | |
| | | | | | | Lys-162 to Ser-171, | L0779: 1. | | |
| | | | | | | Asp-206 to Lys-222. | | | |
| | | 550977 | 243 | 49-702 | 527 | His-15 to Ser-21, | | | |
| | | | | | | Asp-44 to Val-65, | | | |
| | | | | | | Glu-95 to Thr-101, | | | |
| | | | | | | Ala-131 to Asp-142. | | | |
| 106 | HSIDX67 | 1228968 | 116 | 1-858 | 400 | Ile-41 to Arg-47, | AR089: 3, AR061: 3 | | |
| | | | | | | Glu-92 to Lys-99, | H0644: 2, H0529: 2, | | |
| | | | | | | Pro-137 to Lys-150, | S0278: 1, H0036: 1, | | |
| | | | | | | Leu-168 to Pro-174, | H0266: 1, S0003: 1, | | |
| | | | | | | Lys-181 to Asp-190, | H0521: 1 and L0756: 1. | | |
| | | | | | | Glu-211 to Leu-239, | | | |
| | | | | | | Val-247 to Thr-252, | | | |
| | | | | | | Gly-260 to Asp-267. | | | |
| | | 558409 | 244 | 1-342 | 528 | Gly-7 to Pro-12, | | | |
| | | | | | | Ile-40 to Arg-46, | | | |
| | | | | | | Glu-91 to Lys-98. | | | |
| 107 | HMTAV95 | 614936 | 117 | 3-281 | 401 | Asp-1 to Ile-6, | AR089: 0, AR061: 0 | | |
| | | | | | | Trp-13 to Glu-21, | H0518: 2 | | |
| | | | | | | Met-27 to Lys-34, | | | |
| | | | | | | Ala-50 to Thr-56. | | | |
| 108 | HCE3W04 | 1206659 | 118 | 137-1741 | 402 | Pro-51 to Pro-56, | AR089: 1, AR061: 0 | | |
| | | | | | | Thr-78 to Gly-83, | L0789: 4, L0731: 4, | | |
| | | | | | | Pro-116 to Leu-128, | H0539: 3, L0779: 3, | | |
| | | | | | | Gln-130 to Leu-143, | S0007: 2, H0052: 2, | | |
| | | | | | | Glu-209 to Asp-218, | L0157: 2, H0123: 2, | | |
| | | | | | | Tyr-263 to Gly-268, | H0233: 2, L0637: 2, | | |
| | | | | | | Ser-329 to Arg-334, | S0356: 1, S0360: 1, | | |
| | | | | | | Gly-376 to Asp-381, | H0550: 1, H0253: 1, | | |
| | | | | | | Ser-389 to Gly-395, | H0620: 1, H0408: 1, | | |
| | | | | | | Glu-421 to Phe-426, | H0188: 1, S0250: 1, | | |
| | | | | | | Gln-437 to Gly-453, | L0193: 1, L0455: 1, | | |
| | | | | | | Gly-463 to Thr-470, | H0135: 1, H0551: 1, | | |
| | | | | | | Ala-507 to Cys-523, | L0770: 1, L0794: 1, | | |
| | | | | | | Leu-530 to Leu-535. | L0776: 1, L0665: 1, | | |
| | | | | | | | S0392: 1, L0750: 1 and | | |
| | | | | | | | L0777: 1. | | |
| | | 615501 | 245 | 94-873 | 529 | | | | |
| 109 | HMVAC92 | 731732 | 119 | 2-466 | 403 | | AR089: 12, AR061: 2 | Xp11.4- | 300047, |
| | | | | | | | | p11.1 | |
| | | | | | | | | | 300062, |
| | | | | | | | | | 300600, |
| | | | | | | | | | 309470, |
| | | | | | | | | | 309500, |
| | | | | | | | | | 309610, |
| | | | | | | | | | 310500, |
| | | | | | | | | | 310600, |
| | | | | | | | | | 310600, |
| | | | | | | | | | 311050, |
| | | | | | | | | | 312060 |
| 110 | HE8OU68 | 1086802 | 120 | 198-671 | 404 | Ser-8 to His-13, | AR089: 1, AR061: 0 | | |
| | | | | | | Arg-93 to Lys-101, | H0013: 1 | | |
| | | | | | | Ser-107 to Tyr-118. | | | |
| | | 752519 | 246 | 205-648 | 530 | Val-6 to Thr-11. | | | |
| 111 | HMUBI80 | 1206766 | 121 | 157-681 | 405 | Tyr-17 to Ile-45, | AR089: 1, AR061: 0 | | |
| | | | | | | Val-49 to Asp-63, | L0754: 27, L0731: 19, | | |
| | | | | | | Asn-79 to Ala-103, | L0748: 18, L0758: 13, | | |
| | | | | | | Phe-120 to Ser-130, | L0794: 12, L0439: 12, | | |
| | | | | | | Gly-139 to Asp-166. | L0803: 11, L0766: 10, | | |
| | | | | | | | L0805: 10, L0777: 10, | | |
| | | | | | | | L0740: 8, L0747: 8, | | |
| | | | | | | | L0779: 8, L0770: 7, | | |
| | | | | | | | L0749: 7, S0360: 6, | | |
| | | | | | | | H0521: 6, L0756: 5, | | |
| | | | | | | | H0013: 4, H0553: 4, | | |
| | | | | | | | L0776: 4, L0757: 4, | | |
| | | | | | | | S0354: 3, H0328: 3, | | |
| | | | | | | | H0615: 3, L0755: 3, | | |
| | | | | | | | H0556: 2, H0657: 2, | | |
| | | | | | | | H0661: 2, H0580: 2, | | |
| | | | | | | | H0486: 2, S0474: 2, | | |
| | | | | | | | H0421: 2, H0050: 2, | | |
| | | | | | | | S0003: 2, H0031: 2, | | |
| | | | | | | | H0628: 2, H0591: 2, | | |
| | | | | | | | H0038: 2, T0041: 2, | | |
| | | | | | | | S0422: 2, L0640: 2, | | |
| | | | | | | | L0638: 2, L0772: 2, | | |
| | | | | | | | L0662: 2, L0804: 2, | | |
| | | | | | | | L0784: 2, L0659: 2, | | |
| | | | | | | | L0517: 2, L0519: 2, | | |
| | | | | | | | S0052: 2, H0144: 2, | | |
| | | | | | | | L0438: 2, S0126: 2, | | |
| | | | | | | | L0745: 2, L0750: 2, | | |
| | | | | | | | L0780: 2, L0605: 2, | | |
| | | | | | | | H0543: 2, H0395: 1, | | |
| | | | | | | | S0114: 1, H0664: 1, | | |
| | | | | | | | H0638: 1, S0348: 1, | | |
| | | | | | | | S0418: 1, S0444: 1, | | |
| | | | | | | | H0645: 1, H0393: 1, | | |
| | | | | | | | H0613: 1, H0587: 1, | | |
| | | | | | | | H0643: 1, H0574: 1, | | |
| | | | | | | | H0250: 1, H0069: 1, | | |
| | | | | | | | S0346: 1, S0049: 1, | | |
| | | | | | | | H0052: 1, H0596: 1, | | |
| | | | | | | | H0123: 1, L0471: 1, | | |
| | | | | | | | S0388: 1, S0214: 1, | | |
| | | | | | | | H0428: 1, H0622: 1, | | |
| | | | | | | | H0030: 1, H0032: 1, | | |
| | | | | | | | H0673: 1, L0455: 1, | | |
| | | | | | | | H0634: 1, H0264: 1, | | |
| | | | | | | | H0413: 1, H0059: 1, | | |
| | | | | | | | H0131: 1, H0641: 1, | | |
| | | | | | | | S0210: 1, H0529: 1, | | |
| | | | | | | | L0763: 1, L0761: 1, | | |
| | | | | | | | L0764: 1, L0771: 1, | | |
| | | | | | | | L0521: 1, L0649: 1, | | |
| | | | | | | | L0650: 1, L0661: 1, | | |
| | | | | | | | L0384: 1, L0809: 1, | | |
| | | | | | | | L0647: 1, L0788: 1, | | |
| | | | | | | | L0789: 1, L0666: 1, | | |
| | | | | | | | L0663: 1, L0665: 1, | | |
| | | | | | | | S0428: 1, S0374: 1, | | |
| | | | | | | | H0519: 1, H0658: 1, | | |
| | | | | | | | H0648: 1, S0330: 1, | | |
| | | | | | | | S0152: 1, H0696: 1, | | |
| | | | | | | | S0044: 1, H0436: 1, | | |
| | | | | | | | H0540: 1, L0752: 1, | | |
| | | | | | | | L0753: 1, L0759: 1, | | |
| | | | | | | | S0031: 1, H0707: 1, | | |
| | | | | | | | L0608: 1, L0595: 1, | | |
| | | | | | | | S0026: 1, H0423: 1, | | |
| | | | | | | | S0424: 1 and H0506: 1. | | |
| | | 766470 | 247 | 1-426 | 531 | Lys-1 to Ala-15. | | | |
| 112 | HE9RA75 | 766779 | 122 | 2-451 | 406 | Arg-1 to Pro-17, | AR061: 0, AR089: 0 | | |
| | | | | | | Arg-59 to Lys-68. | H0402: 2, S0282: 1, | | |
| | | | | | | | H0156: 1, H0046: 1, | | |
| | | | | | | | L0666: 1, H0144: 1, | | |
| | | | | | | | S0152: 1, S0028: 1 and | | |
| | | | | | | | S0192: 1. | | |
| 113 | HOUHO89 | 1085594 | 123 | 1-609 | 407 | Ile-1 to Glu-13, | AR089: 1, AR061: 1 | | |
| | | | | | | Leu-39 to Trp-48, | S0342: 1 and H0521: 1. | | |
| | | | | | | Thr-61 to Arg-67, | | | |
| | | | | | | Arg-95 to Asn-100, | | | |
| | | | | | | Asp-150 to Leu-157, | | | |
| | | | | | | Lys-176 to Arg-184, | | | |
| | | | | | | Glu-191 to Pro-196. | | | |
| | | 786548 | 248 | 367-909 | 532 | Ser-1 to Gly-7, | | | |
| | | | | | | Asp-24 to Leu-31, | | | |
| | | | | | | Lys-50 to Arg-58, | | | |
| | | | | | | Glu-65 to Arg-73, | | | |
| | | | | | | Thr-102 to His-109, | | | |
| | | | | | | Arg-116 to Ile-122. | | | |
| 114 | HFITE38 | 1063475 | 124 | 2-583 | 408 | Pro-1 to Glu-13, | AR089: 23, AR061: 3 | | |
| | | | | | | Ser-22 to Lys-28, | S0196: 4, H0032: 1 and | | |
| | | | | | | Gln-39 to Arg-50, | L0769: 1. | | |
| | | | | | | Glu-114 to Asp-119, | | | |
| | | | | | | His-171 to His-178. | | | |
| | | 793203 | 249 | 2-409 | 533 | Pro-1 to Glu-13, | | | |
| | | | | | | Ser-22 to Lys-28, | | | |
| | | | | | | Gln-39 to Arg-50, | | | |
| | | | | | | Ser-111 to Asp-116. | | | |
| 115 | HSXCB49 | 800501 | 125 | 459-85 | 409 | | AR051: 6, AR061: 1, | | |
| | | | | | | | AR089: 0 | | |
| | | | | | | | S0036: 2 | | |
| | | 909820 | 250 | 40-273 | 534 | Lys-7 to His-19. | | | |
| 116 | HHFGP83 | 828162 | 126 | 2-304 | 410 | Gly-1 to Pro-22, | AR089: 12, AR061: 9 | | |
| | | | | | | Glu-24 to Thr-30. | L0731: 9, L0665: 6, | | |
| | | | | | | | H0024: 4, L0745: 4, | | |
| | | | | | | | L0747: 4, L0662: 3, | | |
| | | | | | | | L0794: 3, H0550: 2, | | |
| | | | | | | | H0081: 2, H0012: 2, | | |
| | | | | | | | S0022: 2, H0100: 2, | | |
| | | | | | | | L0769: 2, L0764: 2, | | |
| | | | | | | | L0659: 2, H0520: 2, | | |
| | | | | | | | L0777: 2, L0759: 2, | | |
| | | | | | | | H0685: 1, S0040: 1, | | |
| | | | | | | | S0354: 1, H0351: 1, | | |
| | | | | | | | H0392: 1, H0586: 1, | | |
| | | | | | | | L0021: 1, H0253: 1, | | |
| | | | | | | | L0157: 1, H0123: 1, | | |
| | | | | | | | H0050: 1, L0471: 1, | | |
| | | | | | | | H0328: 1, H0615: 1, | | |
| | | | | | | | H0063: 1, L0598: 1, | | |
| | | | | | | | L0770: 1, L0638: 1, | | |
| | | | | | | | L0521: 1, L0768: 1, | | |
| | | | | | | | L0776: 1, L0629: 1, | | |
| | | | | | | | L0657: 1, L0783: 1, | | |
| | | | | | | | L0809: 1, L0666: 1, | | |
| | | | | | | | L0663: 1, S0148: 1, | | |
| | | | | | | | H0670: 1, H0134: 1 and | | |
| | | | | | | | L0779: 1. | | |
| 117 | HPLBP54 | 1212679 | 127 | 1250-564 | 411 | Thr-78 to Glu-83, | AR051: 1124, | | |
| | | | | | | Tyr-86 to Lys-92, | AR050: 1096, AR054: | | |
| | | | | | | Thr-111 to Asn-123, | 650, AR061: 463, | | |
| | | | | | | Thr-156 to Asp-161, | AR089: 454 | | |
| | | | | | | Leu-179 to Gly-187, | H0030: 1, H0547: 1, | | |
| | | | | | | Thr-193 to His-202, | H0522: 1 and L0591: 1. | | |
| | | | | | | Lys-219 to Val-224. | | | |
| | | 849732 | 251 | 15-329 | 535 | | | | |
| 118 | HCE4R40 | 858456 | 128 | 2-415 | 412 | Arg-2 to Gly-10, | AR089: 1, AR061: 1 | 5q31 | 121050, |
| | | | | | | Thr-33 to Ala-39, | | | 131400, |
| | | | | | | Asp-74 to Pro-82, | | | 138040, |
| | | | | | | Leu-96 to Gly-114. | | | 153455, |
| | | | | | | | | | 159000, |
| | | | | | | | | | 179095, |
| | | | | | | | | | 181460, |
| | | | | | | | | | 192974, |
| | | | | | | | | | 192974, |
| | | | | | | | | | 600807, |
| | | | | | | | | | 601596, |
| | | | | | | | | | 601692, |
| | | | | | | | | | 601692, |
| | | | | | | | | | 601692, |
| | | | | | | | | | 601692, |
| | | | | | | | | | 602089, |
| | | | | | | | | | 602121, |
| | | | | | | | | | 602460 |
| 119 | HRABU93 | 1206777 | 129 | 953-2014 | 413 | Phe-14 to Arg-20, | AR089: 5, AR061: 2 | | |
| | | | | | | Glu-157 to Lys-175, | S0346: 1, H0327: 1, | | |
| | | | | | | Gln-182 to Phe-191, | S0038: 1, L0770: 1, | | |
| | | | | | | Glu-195 to Glu-203, | H0555: 1, L0741: 1 and | | |
| | | | | | | Leu-208 to Met-215, | S0031: 1. | | |
| | | | | | | Lys-222 to Leu-228, | | | |
| | | | | | | Leu-230 to His-238, | | | |
| | | | | | | His-248 to Asn-267, | | | |
| | | | | | | Thr-287 to Asp-303. | | | |
| | | 867220 | 252 | 235-627 | 536 | Leu-1 to Ser-14. | | | |
| 120 | HWLQH41 | 1176226 | 130 | 1263-127 | 414 | | AR089: 1, AR061: 1 | | |
| | | | | | | | L0794: 4, L0769: 2, | | |
| | | | | | | | L0803: 2, L0527: 2, | | |
| | | | | | | | L0754: 2, L0777: 2, | | |
| | | | | | | | L0731: 2, S0360: 1, | | |
| | | | | | | | H0392: 1, H0316: 1, | | |
| | | | | | | | H0494: 1, L0764: 1, | | |
| | | | | | | | L0766: 1, L0659: 1, | | |
| | | | | | | | L0809: 1, L0789: 1, | | |
| | | | | | | | L0790: 1, L0747: 1, | | |
| | | | | | | | L0756: 1 and L0759: 1. | | |
| | | 883977 | 253 | 1-882 | 537 | | | | |
| 121 | HMJAH61 | 1176228 | 131 | 16-585 | 415 | Thr-33 to Tyr-41, | AR089: 1, AR061: 0 | | |
| | | | | | | Glu-52 to Phe-60, | H0391: 2, H0392: 2, | | |
| | | | | | | Gly-73 to Asn-78, | S0418: 1, H0415: 1, | | |
| | | | | | | Ser-111 to Asn-116, | S0346: 1, T0067: 1, | | |
| | | | | | | Gly-155 to Gly-161. | H0529: 1, H0520: 1, | | |
| | | | | | | | L0756: 1 and L0758: 1. | | |
| | | 883978 | 254 | 16-696 | 538 | Thr-33 to Tyr-41, | | | |
| | | | | | | Glu-52 to Phe-60, | | | |
| | | | | | | Gly-73 to Asn-78, | | | |
| | | | | | | Ser-111 to Asn-116, | | | |
| | | | | | | Gly-155 to Gly-161. | | | |
| 122 | HBMXU88 | 1228331 | 132 | 259-1722 | 416 | Gln-1 to Arg-24, | AR061: 2, AR089: 1 | | |
| | | | | | | Gln-41 to Ala-48, | S0358: 3, L0766: 3, | | |
| | | | | | | Ser-70 to Gly-82, | S0356: 2, S0045: 2, | | |
| | | | | | | Glu-104 to Phe-112, | S0222: 2, H0266: 2, | | |
| | | | | | | Lys-126 to Ser-132, | H0616: 2, L0655: 2, | | |
| | | | | | | Pro-276 to Ile-281, | H0672: 2, L0777: 2, | | |
| | | | | | | Ile-298 to Arg-304, | L0731: 2, H0422: 2, | | |
| | | | | | | Tyr-344 to Glu-349, | H0171: 1, H0657: 1, | | |
| | | | | | | Ile-369 to His-374, | S0116: 1, H0341: 1, | | |
| | | | | | | Glu-434 to Asn-450, | H0483: 1, H0449: 1, | | |
| | | | | | | Ile-472 to Tyr-478. | H0587: 1, H0497: 1, | | |
| | | | | | | | S0010: 1, H0421: 1, | | |
| | | | | | | | H0327: 1, H0057: 1, | | |
| | | | | | | | H0014: 1, H0375: 1, | | |
| | | | | | | | S6028: 1, S0003: 1, | | |
| | | | | | | | S0214: 1, H0328: 1, | | |
| | | | | | | | H0644: 1, H0032: 1, | | |
| | | | | | | | H0090: 1, H0038: 1, | | |
| | | | | | | | H0087: 1, H0264: 1, | | |
| | | | | | | | H0268: 1, H0529: 1, | | |
| | | | | | | | L0521: 1, L0794: 1, | | |
| | | | | | | | L0803: 1, L0659: 1, | | |
| | | | | | | | L0666: 1, H0521: 1, | | |
| | | | | | | | S0176: 1, L0439: 1, and | | |
| | | | | | | | L0758: 1. | | |
| | | 887636 | 255 | 3-692 | 539 | Pro-18 to Ile-23, | | | |
| | | | | | | Ile-40 to Arg-46, | | | |
| | | | | | | Tyr-86 to Glu-91, | | | |
| | | | | | | Ile-111 to His-116, | | | |
| | | | | | | Glu-176 to Asn-192, | | | |
| | | | | | | Ile-214 to Tyr-220. | | | |
| 123 | HNTCI60 | 1223477 | 133 | 2-1651 | 417 | Leu-19 to Pro-26, | AR089: 1, AR061: 1 | | |
| | | | | | | Pro-32 to Lys-43, | L0747: 12, L0766: 10, | | |
| | | | | | | Asn-77 to Phe-82, | H0683: 9, L0776: 7, | | |
| | | | | | | Arg-94 to Leu-132, | H0521: 6, L0764: 4, | | |
| | | | | | | Gly-137 to Asp-183, | L0439: 4, L0750: 4, | | |
| | | | | | | Glu-211 to His-219, | L0731: 4, H0624: 3, | | |
| | | | | | | Arg-301 to Gly-307, | S0222: 3, H0457: 3, | | |
| | | | | | | Val-384 to Asn-392, | H0051: 3, L0770: 3, | | |
| | | | | | | Asp-403 to Ser-412, | L0769: 3, L0790: 3, | | |
| | | | | | | Gly-489 to Asp-494, | L0666: 3, L0664: 3, | | |
| | | | | | | Lys-529 to Asp-540. | H0547: 3, L0757: 3, | | |
| | | | | | | | L0759: 3, H0050: 2, | | |
| | | | | | | | H0622: 2, H0056: 2, | | |
| | | | | | | | S0210: 2, L0662: 2, | | |
| | | | | | | | L0774: 2, L0519: 2, | | |
| | | | | | | | L0665: 2, H0519: 2, | | |
| | | | | | | | L0748: 2, L0751: 2, | | |
| | | | | | | | S0242: 2, H0556: 1, | | |
| | | | | | | | H0657: 1, H0341: 1, | | |
| | | | | | | | H0484: 1, H0125: 1, | | |
| | | | | | | | S0418: 1, S0354: 1, | | |
| | | | | | | | S0300: 1, S0278: 1, | | |
| | | | | | | | H0370: 1, H0392: 1, | | |
| | | | | | | | H0438: 1, H0600: 1, | | |
| | | | | | | | H0592: 1, T0039: 1, | | |
| | | | | | | | H0250: 1, H0427: 1, | | |
| | | | | | | | H0042: 1, H0575: 1, | | |
| | | | | | | | H0004: 1, H0421: 1, | | |
| | | | | | | | H0012: 1, H0083: 1, | | |
| | | | | | | | H0408: 1, H0355: 1, | | |
| | | | | | | | H0266: 1, H0271: 1, | | |
| | | | | | | | H0169: 1, H0135: 1, | | |
| | | | | | | | H0264: 1, H0272: 1, | | |
| | | | | | | | H0488: 1, H0412: 1, | | |
| | | | | | | | H0623: 1, H0059: 1, | | |
| | | | | | | | H0625: 1, H0641: 1, | | |
| | | | | | | | S0426: 1, L0761: 1, | | |
| | | | | | | | L0646: 1, L0773: 1, | | |
| | | | | | | | L0803: 1, L0657: 1, | | |
| | | | | | | | L0659: 1, L0663: 1, | | |
| | | | | | | | S0428: 1, H0701: 1, | | |
| | | | | | | | S0148: 1, L0438: 1, | | |
| | | | | | | | H0520: 1, H0659: 1, | | |
| | | | | | | | H0648: 1, H0672: 1, | | |
| | | | | | | | S0328: 1, S0380: 1 | | |
| | | | | | | | H0627: 1, H0631: 1, | | |
| | | | | | | | S0028: 1, L0744: 1, | | |
| | | | | | | | L0754: 1, L0756: 1, | | |
| | | | | | | | L0779: 1, L0752: 1, | | |
| | | | | | | | S0434: 1, L0605: 1, | | |
| | | | | | | | L0485: 1, H0136: 1, | | |
| | | | | | | | S0192: 1, H0543: 1, | | |
| | | | | | | | H0422: 1, and S0412: 1. | | |
| | | 890754 | 256 | 2-808 | 540 | | | | |
| 124 | HTLDS55 | 1182304 | 134 | 2-1171 | 418 | Ala-1 to Gln-13, | AR061: 7, AR089: 2, | | |
| | | | | | | Pro-19 to Leu-27, | AR054: 2, AR051: 2, | | |
| | | | | | | Asp-34 to Pro-40, | AR050: 2 | | |
| | | | | | | Ser-45 to Ser-52, | H0618: 5, L0758: 4, | | |
| | | | | | | Lys-105 to Pro-112, | H0038: 3, H0253: 2, | | |
| | | | | | | Pro-146 to Trp-158, | H0553: 1, H0616: 1, | | |
| | | | | | | Arg-181 to Arg-189, | L0789: 1, L0663: 1 and | | |
| | | | | | | Arg-241 to Arg-248, | L0779: 1. | | |
| | | | | | | Asp-285 to Asn-291, | | | |
| | | | | | | Gln-328 to Ile-333, | | | |
| | | | | | | Gln-369 to Thr-375, | | | |
| | | | | | | Arg-380 to Phe-390. | | | |
| | | 891322 | 257 | 2-1171 | 541 | Ala-1 to Gln-13, | | | |
| | | | | | | Pro-19 to Leu-27, | | | |
| | | | | | | Asp-34 to Pro-40, | | | |
| | | | | | | Ser-45 to Ser-52, | | | |
| | | | | | | Lys-105 to Pro-112, | | | |
| | | | | | | Pro-146 to Trp-158, | | | |
| | | | | | | Arg-181 to Arg-189, | | | |
| | | | | | | Arg-241 to Arg-248, | | | |
| | | | | | | Asp-285 to Asn-291, | | | |
| | | | | | | Gln-328 to Ile-333, | | | |
| | | | | | | Gln-369 to Thr-375, | | | |
| | | | | | | Arg-380 to Phe-390. | | | |
| 125 | HWMAE53 | 1187258 | 135 | 1-438 | 419 | Glu-7 to Gln-17, | AR089: 3, AR061: 1 | | |
| | | | | | | Tyr-27 to Cys-32, | S0354: 1, and H0030: 1. | | |
| | | | | | | Thr-63 to Lys-70, | | | |
| | | | | | | Glu-89 to Lys-94, | | | |
| | | | | | | Tyr-100 to Ser-107, | | | |
| | | | | | | Lys-122 to Val-127. | | | |
| | | 909877 | 258 | 1-438 | 542 | Glu-7 to Gln-17, | | | |
| | | | | | | Tyr-27 to Cys-32, | | | |
| | | | | | | Thr-63 to Lys-70, | | | |
| | | | | | | Glu-89 to Lys-94, | | | |
| | | | | | | Tyr-100 to Ser-107, | | | |
| | | | | | | Lys-122 to Val-127. | | | |
| 126 | HTODG16 | 1057155 | 136 | 1-603 | 420 | Arg-80 to Lys-88, | AR089: 22, AR061: 6 | | |
| | | | | | | Ser-94 to Arg-103, | H0264: 2 and L0766: 1. | | |
| | | | | | | Glu-140 to Asn-146, | | | |
| | | | | | | Leu-158 to Tyr-164. | | | |
| | | 909952 | 259 | 1-492 | 543 | Arg-80 to Lys-88, | | | |
| | | | | | | Ser-94 to Arg-103. | | | |
| 127 | HFXCG28 | 1199587 | 137 | 947-1321 | 421 | Ser-3 to Ser-10, | AR061: 3, AR089: 0 | | |
| | | | | | | Ala-26 to Ser-31, | S0001: 1, H0619: 1 and | | |
| | | | | | | Ser-40 to Ser-46, | H0521: 1. | | |
| | | | | | | Phe-95 to Thr-107. | | | |
| | | 909961 | 260 | 3-608 | 544 | | | | |
| 128 | HFTCU45 | 910053 | 138 | 1-504 | 422 | Glu-47 to Asp-56, | AR089: 1, AR061: 0 | | |
| | | | | | | Tyr-131 to Gly-136. | L0789: 4, H0539: 4, | | |
| | | | | | | | L0731: 4, H0052: 3, | | |
| | | | | | | | L0779: 3, S0007: 2, | | |
| | | | | | | | L0157: 2, H0123: 2, | | |
| | | | | | | | H0233: 2, L0637: 2, | | |
| | | | | | | | S0356: 1, S0360: 1, | | |
| | | | | | | | H0550: 1, H0486: 1, | | |
| | | | | | | | H0013: 1, H0253: 1, | | |
| | | | | | | | H0620: 1, H0408: 1, | | |
| | | | | | | | H0188: 1, S0250: 1, | | |
| | | | | | | | L0193: 1, L0455: 1, | | |
| | | | | | | | H0135: 1, H0551: 1, | | |
| | | | | | | | L0770: 1, L0794: 1, | | |
| | | | | | | | L0776: 1, L0665: 1, | | |
| | | | | | | | S0392: 1, L0750: 1 and | | |
| | | | | | | | L0777: 1. | | |
| 129 | HFTBL33 | 1222661 | 139 | 2120-420 | 423 | Leu-3 to Trp-9, | AR089: 16, AR061: 11 | | |
| | | | | | | Ala-11 to Gly-16, | L0789: 4, L0731: 4, | | |
| | | | | | | Arg-19 to Arg-26, | H0539: 3, L0779: 3, | | |
| | | | | | | Pro-83 to Pro-88, | S0007: 2, H0052: 2, | | |
| | | | | | | Thr-110 to Gly-115, | L0157: 2, H0123: 2, | | |
| | | | | | | Pro-148 to Leu-160, | H0233: 2, L0637: 2, | | |
| | | | | | | Gln-162 to Leu-175, | S0356: 1, S0360: 1, | | |
| | | | | | | Glu-241 to Asp-250, | H0550: 1, H0253: 1, | | |
| | | | | | | Tyr-295 to Gly-300, | H0620;1, H0408: 1, | | |
| | | | | | | Ser-361 to Arg-366, | H0188: 1, S0250: 1, | | |
| | | | | | | Gly-408 to Asp-413, | L0193: 1, L0455: 1, | | |
| | | | | | | Ser-421 to Gly-427, | H0135: 1, H0551: 1, | | |
| | | | | | | Glu-453 to Phe-458, | L0770: 1, L0794: 1, | | |
| | | | | | | Gln-469 to Gly-485, | L0776: 1, L0665: 1, | | |
| | | | | | | Gly-495 to Thr-502, | S0392: 1, L0750: 1 and | | |
| | | | | | | Ala-539 to Cys-555, | L0777: 1. | | |
| | | | | | | Leu-562 to Leu-567. | | | |
| | | 910055 | 261 | 1-1122 | 545 | Glu-48 to Asp-57. | | | |
| 130 | HCEPH84 | 1148128 | 140 | 1334-510 | 424 | | AR089: 1, AR061: 1 | | |
| | | | | | | | L0439: 6, L0745: 5, | | |
| | | | | | | | H0052: 4, L0438: 4, | | |
| | | | | | | | L0592: 3, L0604: 3, | | |
| | | | | | | | H0009: 2, S0001: 1, | | |
| | | | | | | | H0599: 1, H0196: 1, | | |
| | | | | | | | H0172: 1, T0010: 1, | | |
| | | | | | | | S0364: 1, S0366: 1, | | |
| | | | | | | | S0038: 1, L0789: 1, | | |
| | | | | | | | H0144: 1, S0044: 1, | | |
| | | | | | | | L0747: 1, L0759: 1 and | | |
| | | | | | | | L0605: 1. | | |
| | | 910864 | 262 | 1689-706 | 546 | Ser-65 to Gly-75, | | | |
| | | | | | | Thr-84 to Ser-89. | | | |
| 131 | HHFON19 | 1061675 | 141 | 157-2 | 425 | Phe-12 to Ser-24. | AR089: 19, AR061: 17 | | |
| | | | | | | | H0645: 2 and H0050: 1. | | |
| | | 910891 | 263 | 250-825 | 547 | Thr-136 to Cys-141. | | | |
| 132 | HEMCL65 | 910900 | 142 | 3-368 | 426 | Val-7 to Arg-13. | AR054: 8, AR051: 3, | | |
| | | | | | | | AR061: 2, AR089: 1, | | |
| | | | | | | | AR050: 0 | | |
| | | | | | | | S0046: 5, L0747: 4, | | |
| | | | | | | | H0575: 3, H0266: 3, | | |
| | | | | | | | L0741: 3, L0748: 3, | | |
| | | | | | | | L0750: 3, S0045: 2, | | |
| | | | | | | | H0150: 2, H0012: 2, | | |
| | | | | | | | H0039: 2, H0622: 2, | | |
| | | | | | | | L0751: 2, L0749: 2, | | |
| | | | | | | | L0780: 2, H0445: 2, | | |
| | | | | | | | L0605: 2, L0599: 2, | | |
| | | | | | | | H0171: 1, T0049: 1, | | |
| | | | | | | | H0261: 1, H0587: 1, | | |
| | | | | | | | L0021: 1, H0599: 1, | | |
| | | | | | | | H0253: 1, T0048: 1, | | |
| | | | | | | | H0024: 1, S0051: 1, | | |
| | | | | | | | L0483: 1, H0644: 1, | | |
| | | | | | | | H0268: 1, T0004: 1, | | |
| | | | | | | | H0647: 1, L0771: 1, | | |
| | | | | | | | L0662: 1, L0775: 1, | | |
| | | | | | | | L0512: 1, L0659: 1, | | |
| | | | | | | | L0790: 1, S3012: 1, | | |
| | | | | | | | S0028: 1, L0743: 1, | | |
| | | | | | | | H0444: 1, L0588: 1, | | |
| | | | | | | | L0603: 1 and H0506: 1. | | |
| 133 | HMAMB94 | 910909 | 143 | 3-587 | 427 | Trp-1 to Gly-6, | AR061: 1, AR089: 1 | | |
| | | | | | | Gln-20 to Asn-26, | H0266: 2, H0644: 2, | | |
| | | | | | | Pro-30 to Glu-35, | H0341: 1, S0278: 1, | | |
| | | | | | | Asn-43 to Tyr-50, | H0051: 1, L0602: 1 and | | |
| | | | | | | Ser-57 to Pro-65, | L0601: 1. | | |
| | | | | | | Ser-74 to Thr-82, | | | |
| | | | | | | Lys-98 to Gly-107, | | | |
| | | | | | | Asp-119 to Asn-125, | | | |
| | | | | | | Gly-159 to Glu-166. | | | |
| 134 | HFICR59 | 1171979 | 144 | 2-739 | 428 | Gly-1 to Lys-13, | AR089: 1, AR061: 0 | | |
| | | | | | | Thr-79 to Ala-92, | L0794: 6, L0598: 2, | | |
| | | | | | | Gly-114 to Asn-119, | L0803: 2, L0748: 2, | | |
| | | | | | | Ser-190 to Val-196. | S0040: 1, S0046: 1, | | |
| | | | | | | | H0431: 1, H0318: 1, | | |
| | | | | | | | L0766: 1, L0606: 1, | | |
| | | | | | | | L0749: 1, L0758: 1 and | | |
| | | | | | | | S0192: 1. | | |
| | | 911317 | 264 | 2-721 | 548 | Ser-2 to Lys-7, | | | |
| | | | | | | Thr-73 to Ala-86, | | | |
| | | | | | | Gly-108 to Asn-113, | | | |
| | | | | | | Ser-184 to Val-190. | | | |
| 135 | HSXDD55 | 911460 | 145 | 312-737 | 429 | Arg-75 to Lys-83, | AR061: 2, AR089: 2 | | |
| | | | | | | Ser-89 to Arg-102, | L0439: 2, L0617: 1, | | |
| | | | | | | Met-136 to Arg-142. | S0356: 1, H0457: 1, | | |
| | | | | | | | S0036: 1, H0547: 1, | | |
| | | | | | | | L0758: 1 and L0608: 1. | | |
| 136 | HCQCI06 | 915000 | 146 | 3-764 | 430 | Arg-16 to Ile-28, | AR061: 4, AR089: 2 | | |
| | | | | | | Glu-39 to Ser-46, | L0747: 6, L0777: 5, | | |
| | | | | | | Lys-52 to Leu-57, | L0794: 4, S0126: 4, | | |
| | | | | | | Glu-71 to Val-77, | S0242: 3, H0624: 2, | | |
| | | | | | | Thr-90 to Lys-114, | H0171: 2, H0014: 2, | | |
| | | | | | | Asn-141 to His-152, | L0803: 2, L0809: 2, | | |
| | | | | | | Leu-160 to Asp-171, | S0374: 2, L0779: 2, | | |
| | | | | | | Lys-249 to Asn-254. | L0759: 2, H0170: 1, | | |
| | | | | | | | S0040: 1, S0342: 1, | | |
| | | | | | | | H0344: 1, T0049: 1, | | |
| | | | | | | | S0356: 1, S0358: 1, | | |
| | | | | | | | H0486: 1, H0013: 1, | | |
| | | | | | | | L0022: 1, T0082: 1, | | |
| | | | | | | | L0105: 1, H0596: 1, | | |
| | | | | | | | H0266: 1, H0687: 1, | | |
| | | | | | | | S0250: 1, H0553: 1, | | |
| | | | | | | | L0763: 1, L0770: 1, | | |
| | | | | | | | L0662: 1, L0804: 1, | | |
| | | | | | | | L0655: 1, L0783: 1, | | |
| | | | | | | | L0787: 1, L0663: 1, | | |
| | | | | | | | L0565: 1, S0432: 1, | | |
| | | | | | | | L0744: 1, L0758: 1, | | |
| | | | | | | | L0601: 1, S0196: 1 and | | |
| | | | | | | | H0506: 1. | | |
| 137 | HPMLJ44 | 1199601 | 147 | 322-1011 | 431 | Gln-25 to Gln-31, | AR089: 15, AR061: 5 | | |
| | | | | | | Gly-44 to Gly-50, | L0731: 8, H0038: 6, | | |
| | | | | | | Leu-60 to Arg-69, | L0766: 6, H0616: 4, | | |
| | | | | | | Thr-103 to Gln-108, | L0598: 4, L0774: 4, | | |
| | | | | | | Val-136 to Val-142, | H0547: 4, L0745: 4, | | |
| | | | | | | Thr-149 to Arg-170, | H0486: 3, L0775: 3, | | |
| | | | | | | Tyr-197 to Tyr-207, | L0752: 3, L0362: 3, | | |
| | | | | | | Glu-213 to Asn-219. | H0170: 2, H0657: 2, | | |
| | | | | | | | H0013: 2, S0003: 2, | | |
| | | | | | | | H0494: 2, S0210: 2, | | |
| | | | | | | | L0770: 2, L0651: 2, | | |
| | | | | | | | L0555: 2, L0655: 2, | | |
| | | | | | | | L0665: 2, L0438: 2, | | |
| | | | | | | | S0126: 2, L0439: 2, | | |
| | | | | | | | L0740: 2, L0594: 2, | | |
| | | | | | | | S0412: 2, H0394: 1, | | |
| | | | | | | | S0418: 1, S0358: 1, | | |
| | | | | | | | S0360: 1, S0045: 1, | | |
| | | | | | | | H0441: 1, H0574: 1, | | |
| | | | | | | | T0039: 1, H0250: 1, | | |
| | | | | | | | H0156: 1, H0575: 1, | | |
| | | | | | | | H0581: 1, T0110: 1, | | |
| | | | | | | | L0163: 1, H0038: 1, | | |
| | | | | | | | H0594: 1, S0214: 1, | | |
| | | | | | | | H0644: 1, L0055: 1, | | |
| | | | | | | | H0551: 1, H0412: 1, | | |
| | | | | | | | S0426: 1, UNKWN: 1, | | |
| | | | | | | | H0529: 1, L0520: 1, | | |
| | | | | | | | L0625: 1, L0637: 1, | | |
| | | | | | | | L0627: 1, L0772: 1, | | |
| | | | | | | | L0773: 1, L0521: 1, | | |
| | | | | | | | L0662: 1, L0768: 1, | | |
| | | | | | | | L0522: 1, L0650: 1, | | |
| | | | | | | | L0375: 1, L0806: 1, | | |
| | | | | | | | L0776: 1, L0656: 1, | | |
| | | | | | | | L0790: 1, L0666: 1, | | |
| | | | | | | | L0663: 1, L0664: 1, | | |
| | | | | | | | H0144: 1, S0374: 1, | | |
| | | | | | | | H0519: 1, H0659: 1, | | |
| | | | | | | | H0660: 1, H0672: 1, | | |
| | | | | | | | H0539: 1, H0696: 1, | | |
| | | | | | | | S0027: 1, S0028: 1, | | |
| | | | | | | | L0750: 1, L0777: 1, | | |
| | | | | | | | L0753: 1, L0758: 1, | | |
| | | | | | | | L0759: 1, L0587: 1, | | |
| | | | | | | | L0592: 1, L0608: 1 and | | |
| | | | | | | | L0361: 1. | | |
| | | 915069 | 265 | 299-847 | 549 | Gln-25 to Gln-31, | | | |
| | | | | | | Gly-44 to Gly-50, | | | |
| | | | | | | Leu-60 to Arg-69, | | | |
| | | | | | | Thr-103 to Gln-108, | | | |
| | | | | | | Val-136 to Val-142, | | | |
| | | | | | | Thr-149 to Gly-179. | | | |
| 138 | HNTCU51 | 1223479 | 148 | 113-1507 | 432 | Gln-37 to Asn-48, | AR089: 3, AR061: 1 | | |
| | | | | | | Asn-101 to Phe-110, | L0663: 7, L0748: 6, | | |
| | | | | | | Asp-142 to Tyr-150, | L0750: 6, L0740: 5, | | |
| | | | | | | Pro-251 to Thr-256, | L0731: 5, L0608: 5, | | |
| | | | | | | Glu-319 to Arg-334, | L0659: 4, H0519: 4, | | |
| | | | | | | Glu-357 to Arg-363, | L0754: 4, L0747: 4, | | |
| | | | | | | Gly-368 to Lys-378, | L0756: 4, L0105: 3, | | |
| | | | | | | Lys-407 to Leu-424, | H0551: 3, L0764: 3, | | |
| | | | | | | Ser-451 to Asn-463. | L0794: 3, L0803: 3, | | |
| | | | | | | | L0783: 3, S0374: 3, | | |
| | | | | | | | L0439: 3, L0749: 3, | | |
| | | | | | | | L0755: 3, H0616: 2, | | |
| | | | | | | | H0059: 2, L0662: 2, | | |
| | | | | | | | L0768: 2, L0804: 2, | | |
| | | | | | | | L0775: 2, L0665: 2, | | |
| | | | | | | | L0438: 2, L0602: 2, | | |
| | | | | | | | S0152: 2, L0744: 2, | | |
| | | | | | | | L0758: 2, L0759: 2, | | |
| | | | | | | | L0593: 2, L0595: 2, | | |
| | | | | | | | H0543: 2, H0657: 1, | | |
| | | | | | | | S0420: 1, S0356: 1, | | |
| | | | | | | | S0358: 1, S0360: 1, | | |
| | | | | | | | S0046: 1, H0393: 1, | | |
| | | | | | | | H0411: 1, H0331: 1, | | |
| | | | | | | | H0013: 1, L0022: 1, | | |
| | | | | | | | H0036: 1, H0318: 1, | | |
| | | | | | | | H0309: 1, L0471: 1, | | |
| | | | | | | | H0015: 1, S0051: 1, | | |
| | | | | | | | H0375: 1, H0266: 1, | | |
| | | | | | | | S0338: 1, S0003: 1, | | |
| | | | | | | | H0617: 1, H0163: 1, | | |
| | | | | | | | H0038: 1, H0268: 1, | | |
| | | | | | | | H0412: 1, T0041: 1, | | |
| | | | | | | | L0598: 1, L0369: 1, | | |
| | | | | | | | L0763: 1, L0761: 1, | | |
| | | | | | | | L0641: 1, L0645: 1, | | |
| | | | | | | | L0765: 1, L0766: 1, | | |
| | | | | | | | L0650: 1, L0774: 1, | | |
| | | | | | | | L0806: 1, L0805: 1, | | |
| | | | | | | | L0776: 1, L0655: 1, | | |
| | | | | | | | L0809: 1, L0790: 1, | | |
| | | | | | | | L0791: 1, H0144: 1, | | |
| | | | | | | | H0547: 1, S0126: 1, | | |
| | | | | | | | H0658: 1, H0666: 1, | | |
| | | | | | | | S0330: 1, H0696: 1, | | |
| | | | | | | | S0027: 1, L0777: 1, | | |
| | | | | | | | L0780: 1, L0752: 1, | | |
| | | | | | | | L0757: 1, S0031: 1, | | |
| | | | | | | | S0194: 1 and H0506: 1. | | |
| | | 916047 | 266 | 95-718 | 550 | Gln-37 to Asn-48, | | | |
| | | | | | | Asn-101 to Phe-110, | | | |
| | | | | | | Asp-142 to Tyr-150. | | | |
| 139 | HNFDO52 | 916260 | 149 | 2-358 | 433 | | AR089: 5, AR061: 5 | 2q11 | 129490, |
| | | | | | | | H0083: 17, H0556: 14, | | 600334 |
| | | | | | | | H0265: 7, L0794: 6, | | |
| | | | | | | | H0271: 5, H0543: 5, | | |
| | | | | | | | L0766: 4, L0809: 4, | | |
| | | | | | | | H0635: 2, H0150: 2, | | |
| | | | | | | | S0114: 1, H0650: 1, | | |
| | | | | | | | H0645: 1, S0222: 1, | | |
| | | | | | | | H0438: 1, H0196: 1, | | |
| | | | | | | | H0594: 1, H0416: 1, | | |
| | | | | | | | H0615: 1, H0033: 1, | | |
| | | | | | | | H0087: 1, H0488: 1, | | |
| | | | | | | | S0142: 1, L0764: 1, | | |
| | | | | | | | L0803: 1, L0655: 1, | | |
| | | | | | | | L0657: 1, L0656: 1, | | |
| | | | | | | | L0659: 1, L0783: 1, | | |
| | | | | | | | L0790: 1, L0663: 1, | | |
| | | | | | | | L0665: 1, S0216: 1, | | |
| | | | | | | | H0670: 1, H0436: 1, | | |
| | | | | | | | L0758: 1, H0595: 1, | | |
| | | | | | | | H0542: 1 and H0422: 1. | | |
| 140 | HSHBW40 | 1144361 | 150 | 1-1134 | 434 | Glu-8 to Asp-14, | AR061: 14, AR089: 7 | | |
| | | | | | | Glu-60 to Asn-68, | L0748: 19, L0439: 17, | | |
| | | | | | | Leu-99 to Arg-104, | L0794: 9, H0046: 8, | | |
| | | | | | | Arg-130 to Leu-139, | H0620: 6, L0769: 6, | | |
| | | | | | | Thr-281 to His-289, | L0731: 6, L0764: 5, | | |
| | | | | | | Glu-301 to Val-307, | L0771: 5, L0803: 5, | | |
| | | | | | | Ser-310 to Leu-319, | S0010: 4, H0052: 4, | | |
| | | | | | | Ser-335 to Tyr-340, | H0545: 4, H0038: 4, | | |
| | | | | | | Gln-368 to Phe-378. | H0616: 4, L0766: 4, | | |
| | | | | | | | L0755: 4, L0758: 4, | | |
| | | | | | | | H0624: 3, S0212: 3, | | |
| | | | | | | | S0420: 3, H0333: 3, | | |
| | | | | | | | H0266: 3, L0774: 3, | | |
| | | | | | | | L0750: 3, L0759: 3, | | |
| | | | | | | | S0040: 2, S0007: 2, | | |
| | | | | | | | H0253: 2, S0346: 2, | | |
| | | | | | | | L0455: 2, H0494: 2, | | |
| | | | | | | | L0809: 2, S0328: 2, | | |
| | | | | | | | S0037: 2, L0743: 2, | | |
| | | | | | | | L0754: 2, L0756: 2, | | |
| | | | | | | | L0599: 2, L0595: 2, | | |
| | | | | | | | H0265: 1, S0114: 1, | | |
| | | | | | | | H0657: 1, H0656: 1, | | |
| | | | | | | | S0418: 1, H0393: 1, | | |
| | | | | | | | S0300: 1, S0222: 1, | | |
| | | | | | | | H0370: 1, H0357: 1, | | |
| | | | | | | | H0282: 1, T0039: 1, | | |
| | | | | | | | T0082: 1, H0036: 1, | | |
| | | | | | | | H0150: 1, H0009: 1, | | |
| | | | | | | | N0006: 1, H0201: 1, | | |
| | | | | | | | T0010: 1, H0083: 1, | | |
| | | | | | | | H0398: 1, H0604: 1, | | |
| | | | | | | | H0617: 1, H0087: 1, | | |
| | | | | | | | H0551: 1, L0564: 1, | | |
| | | | | | | | T0041: 1, H0132: 1, | | |
| | | | | | | | S0150: 1, H0529: 1, | | |
| | | | | | | | L0770: 1, L0638: 1, | | |
| | | | | | | | L0639: 1, L0772: 1, | | |
| | | | | | | | L0386: 1, L0381: 1, | | |
| | | | | | | | L0775: 1, L0375: 1, | | |
| | | | | | | | L0806: 1, L0653: 1, | | |
| | | | | | | | L0527: 1, L0658: 1, | | |
| | | | | | | | L0659: 1, L0382: 1, | | |
| | | | | | | | L0788: 1, L0789: 1, | | |
| | | | | | | | L0666: 1, L0664: 1, | | |
| | | | | | | | L0665: 1, L0438: 1, | | |
| | | | | | | | H0519: 1, H0659: 1, | | |
| | | | | | | | H0658: 1, L0355: 1, | | |
| | | | | | | | S0330: 1, S3014: 1, | | |
| | | | | | | | S0027: 1, L0741: 1, | | |
| | | | | | | | L0752: 1, L0753: 1, | | |
| | | | | | | | S0031: 1, S0434: 1, | | |
| | | | | | | | L0605: 1, S0011: 1 and | | |
| | | | | | | | S0196: 1. | | |
| | | 919040 | 267 | 3-158 | 551 | Leu-20 to Arg-25. | | | |
| 141 | HHEJR23 | 1200643 | 151 | 3-674 | 435 | Lys-51 to Ile-64, | AR089: 1, AR061: 0 | | |
| | | | | | | Ser-106 to Lys-111, | L0758: 5, S0360: 3, | | |
| | | | | | | Lys-156 to Ser-162, | L0768: 3, S0380: 3, | | |
| | | | | | | Lys-175 to Glu-180. | L0731: 3, H0038: 2, | | |
| | | | | | | | S0372: 2, L0761: 2, | | |
| | | | | | | | L0766: 2, H0539: 2, | | |
| | | | | | | | L0755: 2, H0341: 1, | | |
| | | | | | | | S0110: 1, S0418: 1, | | |
| | | | | | | | H0637: 1, S0278: 1, | | |
| | | | | | | | S0222: 1, H0052: 1, | | |
| | | | | | | | L0040: 1, H0252: 1, | | |
| | | | | | | | H0169: 1, H0616: 1, | | |
| | | | | | | | H0560: 1, S0382: 1, | | |
| | | | | | | | L0763: 1, L0770: 1, | | |
| | | | | | | | L0769: 1, L0646: 1, | | |
| | | | | | | | L0764: 1, L0803: 1, | | |
| | | | | | | | L0804: 1, L0775: 1, | | |
| | | | | | | | L0518: 1, L0809: 1, | | |
| | | | | | | | L0529: 1, L0791: 1, | | |
| | | | | | | | L0664: 1, H0659: 1, | | |
| | | | | | | | H0648: 1, S0406: 1, | | |
| | | | | | | | L0751: 1, L0754: 1, | | |
| | | | | | | | L0779: 1, L0757: 1, | | |
| | | | | | | | L0597: 1, H0667: 1, | | |
| | | | | | | | S0242: 1, H0542: 1, | | |
| | | | | | | | H0543: 1 and L0698: 1. | | |
| | | 919082 | 268 | 864-205 | 552 | Lys-47 to Ile-60, | | | |
| | | | | | | Ser-102 to Lys-107, | | | |
| | | | | | | Lys-152 to Ser-158, | | | |
| | | | | | | Lys-171 to Glu-176. | | | |
| 142 | HCFMW71 | 1199561 | 152 | 1-735 | 436 | Asp-28 to Leu-35, | AR089: 10, AR061: 3 | | |
| | | | | | | Asp-52 to Cys-57, | L0748: 3, L0749: 3, | | |
| | | | | | | Gln-87 to Lys-92, | L0005: 1, L0777: 1, | | |
| | | | | | | Phe-99 to Ser-104, | L0361: 1 and H0423: 1. | | |
| | | | | | | Ala-112 to Lys-117, | | | |
| | | | | | | Pro-181 to Thr-186. | | | |
| | | 920506 | 269 | 195-407 | 553 | Pro-7 to Thr-12. | | | |
| 143 | HBODA38 | 923456 | 153 | 352-1470 | 437 | Pro-12 to Thr-23, | AR089: 39, AR061: 15 | | |
| | | | | | | Glu-49 to Val-56, | S0364: 10, H0373: 7, | | |
| | | | | | | Leu-77 to Tyr-83, | L0604: 7, H0196: 4, | | |
| | | | | | | Ala-125 to Glu-138, | L0485: 3, L0002: 1, | | |
| | | | | | | Tyr-144 to Gly-154, | H0411: 1, H0599: 1, | | |
| | | | | | | Gly-227 to Thr-233, | H0327: 1, L0471: 1, | | |
| | | | | | | His-286 to Arg-292, | L0163: 1, S0366: 1, | | |
| | | | | | | Pro-366 to Lys-373. | L0747: 1 and L0750: 1. | | |
| 144 | HCYBK19 | 925494 | 154 | 2-1348 | 438 | Glu-4 to Gly-19, | AR089: 1, AR061: 0 | | |
| | | | | | | Ser-32 to Ser-39, | L0794: 18, L0770: 10, | | |
| | | | | | | Asp-106 to Asp-114, | L0779: 9, L0438: 8, | | |
| | | | | | | Met-145 to Arg-152, | L0754: 7, H0052: 6, | | |
| | | | | | | Asn-161 to Pro-177, | H0553: 6, L0803: 6, | | |
| | | | | | | Ala-210 to Gly-216, | L0747: 6, S0222: 4, | | |
| | | | | | | Tyr-260 to Tyr-270, | H0013: 4, S0010: 4, | | |
| | | | | | | Ser-282 to His-290, | L0769: 4, L0659: 4, | | |
| | | | | | | Thr-307 to Tyr-323, | L0809: 4, L0439: 4, | | |
| | | | | | | Cys-369 to Lys-382, | L0752: 4, L0758: 4, | | |
| | | | | | | Asn-433 to Lys-441. | S6016: 3, H0244: 3, | | |
| | | | | | | | H0144: 3, S0126: 3, | | |
| | | | | | | | L0599: 3, S0046: 2, | | |
| | | | | | | | L0157: 2, H0032: 2, | | |
| | | | | | | | H0169: 2, S0036: 2, | | |
| | | | | | | | H0038: 2, H0616: 2, | | |
| | | | | | | | L0763: 2, L0761: 2, | | |
| | | | | | | | L0766: 2, L0804: 2, | | |
| | | | | | | | L0650: 2, L0775: 2, | | |
| | | | | | | | L0805: 2, L0792: 2, | | |
| | | | | | | | L0665: 2, H0520: 2, | | |
| | | | | | | | H0436: 2, L0731: 2, | | |
| | | | | | | | L0596: 2, L0592: 2, | | |
| | | | | | | | L0581: 2, L0366: 2, | | |
| | | | | | | | H0423: 2, L0393: 1, | | |
| | | | | | | | H0656: 1, L0808: 1, | | |
| | | | | | | | S0282: 1, H0662: 1, | | |
| | | | | | | | S0376: 1, S0132: 1, | | |
| | | | | | | | H0393: 1, H0411: 1, | | |
| | | | | | | | H0369: 1, H0550: 1, | | |
| | | | | | | | H0441: 1, H0333: 1, | | |
| | | | | | | | T0114: 1, H0156: 1, | | |
| | | | | | | | L0021: 1, H0085: 1, | | |
| | | | | | | | H0050: 1, H0014: 1, | | |
| | | | | | | | H0020: 1, H0051: 1, | | |
| | | | | | | | S6028: 1, H0644: 1, | | |
| | | | | | | | S0364: 1, H0124: 1, | | |
| | | | | | | | H0068: 1, H0135: 1, | | |
| | | | | | | | H0591: 1, L0564: 1, | | |
| | | | | | | | H0342: 1, H0633: 1, | | |
| | | | | | | | L0640: 1, L0638: 1, | | |
| | | | | | | | L0764: 1, L0648: 1, | | |
| | | | | | | | L0662: 1, L0768: 1, | | |
| | | | | | | | L0649: 1, L0774: 1, | | |
| | | | | | | | L0636: 1, L0789: 1, | | |
| | | | | | | | L0666: 1, L0663: 1, | | |
| | | | | | | | L0352: 1, H0547: 1, | | |
| | | | | | | | H0689: 1, H0690: 1, | | |
| | | | | | | | H0539: 1, H0555: 1, | | |
| | | | | | | | S0028: 1, L0742: 1, | | |
| | | | | | | | L0748: 1, L0745: 1, | | |
| | | | | | | | L0750: 1, L0756: 1, | | |
| | | | | | | | L0777: 1, L0780: 1, | | |
| | | | | | | | L0757: 1, L0759: 1, | | |
| | | | | | | | S0308: 1, L0588: 1, | | |
| | | | | | | | S0106: 1, S0026: 1, | | |
| | | | | | | | H0667: 1, S0276: 1, | | |
| | | | | | | | H0543: 1 and H0677: 1. | | |
| 145 | HOFNH30 | 928365 | 155 | 3-320 | 439 | | AR089: 4, AR061: 2 | | |
| | | | | | | | H0415: 13, H0414: 2, | | |
| | | | | | | | H0355: 1, H0517: 1 and | | |
| | | | | | | | H0539: 1. | | |
| 146 | HFXED03 | 1136469 | 156 | 2-1429 | 440 | Gly-2 to Gly-8, | AR061: 12, AR089: 10 | | |
| | | | | | | Arg-54 to Arg-61, | H0031: 3, L0803: 3, | | |
| | | | | | | Val-79 to Gln-85, | S0028: 3, H0623: 2, | | |
| | | | | | | Lys-112 to Asn-121, | S0040: 1, H0341: 1, | | |
| | | | | | | Asp-153 to Tyr-161, | S0001: 1, S0420: 1, | | |
| | | | | | | Phe-187 to Arg-193, | H0580: 1, T0040: 1, | | |
| | | | | | | Pro-262 to Thr-267, | S0010: 1, S0346: 1, | | |
| | | | | | | Glu-330 to Asn-348. | N0006: 1, S6028: 1, | | |
| | | | | | | | H0266: 1, H0328: 1, | | |
| | | | | | | | L0455: 1, H0124: 1, | | |
| | | | | | | | T0041: 1, S0210: 1, | | |
| | | | | | | | L0662: 1, H0144: 1, | | |
| | | | | | | | H0520: 1, S0152: 1, | | |
| | | | | | | | L0439: 1, L0757: 1, | | |
| | | | | | | | H0445: 1, L0366: 1, | | |
| | | | | | | | S0026: 1 and L0469: 1. | | |
| | | 928952 | 270 | 1-924 | 554 | | | | |
| 147 | HWMEV63 | 931154 | 157 | 2-454 | 441 | His-9 to Asn-26, | AR089: 1, AR061: 1 | 3q21-q25 | 106165, |
| | | | | | | Pro-47 to Ser-61, | S0358: 1 and H0580: 1. | | 117700, |
| | | | | | | Arg-116 to Thr-122. | | | 117700, |
| | | | | | | | | | 150210, |
| | | | | | | | | | 169600, |
| | | | | | | | | | 180380, |
| | | | | | | | | | 180380, |
| | | | | | | | | | 180380, |
| | | | | | | | | | 190000, |
| | | | | | | | | | 203500, |
| | | | | | | | | | 222900, |
| | | | | | | | | | 232050, |
| | | | | | | | | | 276902, |
| | | | | | | | | | 600882, |
| | | | | | | | | | 601199, |
| | | | | | | | | | 601199, |
| | | | | | | | | | 601199, |
| | | | | | | | | | 601471, |
| | | | | | | | | | 601682 |
| 148 | HWHGT26 | 1147962 | 158 | 746-3 | 442 | Glu-13 to Glu-30, | AR089: 4, AR061: 1 | | |
| | | | | | | Arg-54 to Ser-64. | L0748: 4, L0746: 4, | | |
| | | | | | | | L0766: 3, H0341: 2, | | |
| | | | | | | | H0013: 2, H0264: 2, | | |
| | | | | | | | H0547: 2, H0519: 2, | | |
| | | | | | | | S0152: 2, S0146: 2, | | |
| | | | | | | | S0028: 2, H0445: 2, | | |
| | | | | | | | L0485: 2, S0011: 2, | | |
| | | | | | | | S0242: 2, H0171: 1, | | |
| | | | | | | | S0470: 1, L0002: 1, | | |
| | | | | | | | H0583: 1, H0580: 1, | | |
| | | | | | | | H0586: 1, H0587: 1, | | |
| | | | | | | | H0486: 1, H0421: 1, | | |
| | | | | | | | H0546: 1, H0024: 1, | | |
| | | | | | | | H0083: 1, H0271: 1, | | |
| | | | | | | | H0615: 1, H0412: 1, | | |
| | | | | | | | H0494: 1, S0150: 1, | | |
| | | | | | | | S0002: 1, L0373: 1, | | |
| | | | | | | | L0523: 1, L0659: 1, | | |
| | | | | | | | L0663: 1, H0144: 1, | | |
| | | | | | | | S0374: 1, S3014: 1, | | |
| | | | | | | | L0740: 1, L0751: 1, | | |
| | | | | | | | L0754: 1, L0779: 1, | | |
| | | | | | | | H0595: 1, S0194: 1, | | |
| | | | | | | | S0196: 1, H0543: 1, | | |
| | | | | | | | H0423: 1 and H0008: 1. | | |
| | | 931213 | 271 | 6-995 | 555 | Ser-12 to Asp-22, | | | |
| | | | | | | Cys-25 to Asn-32, | | | |
| | | | | | | Thr-39 to Glu-51, | | | |
| | | | | | | Leu-66 to Gly-72, | | | |
| | | | | | | Ala-76 to Thr-83, | | | |
| | | | | | | Arg-91 to Tyr-103, | | | |
| | | | | | | Lys-105 to Tyr-112, | | | |
| | | | | | | Gly-114 to Asn-121, | | | |
| | | | | | | Glu-126 to Gly-146, | | | |
| | | | | | | Val-158 to Lys-178. | | | |
| 149 | HBXBG65 | 932780 | 159 | 2-535 | 443 | Asn-1 to Arg-10, | AR089: 1, AR061: 0 | 14q32.1 | 107280, |
| | | | | | | Pro-105 to Val-114, | H0144: 2, S0038: 1 and | | 107280, |
| | | | | | | Gln-130 to Glu-140. | L0439: 1. | | 107400, |
| | | | | | | | | | 107400, |
| | | | | | | | | | 122500, |
| | | | | | | | | | 186960, |
| | | | | | | | | | 245200, |
| | | | | | | | | | 601841 |
| 150 | HSDHB12 | 941973 | 160 | 3-638 | 444 | Met-49 to Tyr-56, | AR061: 8, AR089: 3 | | |
| | | | | | | Gln-91 to Val-101, | L0803: 4, L0794: 3, | | |
| | | | | | | Pro-172 to Gln-181, | L0747: 3, H0599: 2, | | |
| | | | | | | Ser-183 to Ile-197. | L0659: 2, L0789: 2, | | |
| | | | | | | | S0364: 1, L0804: 1, | | |
| | | | | | | | H0539: 1, L0720: 1 and | | |
| | | | | | | | S0031: 1. | | |
| | | 969094 | 272 | 3-278 | 556 | | | | |
| | | 969097 | 273 | 700-182 | 557 | Met-1 to Tyr-8, | | | |
| | | | | | | Gln-43 to Val-53, | | | |
| | | | | | | Pro-124 to Gln-133, | | | |
| | | | | | | Ser-135 to Ile-149. | | | |
| 151 | HLWAR77 | 947484 | 161 | 1287-292 | 445 | Gln-97 to Pro-114, | AR050: 21, AR054: 9, | | |
| | | | | | | Trp-117 to Lys-129, | AR051: 3, AR089: 1, | | |
| | | | | | | Thr-166 to Gln-173, | AR061: 1 | | |
| | | | | | | Ser-178 to Lys-183, | H0553: 4 and L0759: 2. | | |
| | | | | | | Glu-250 to Phe-256, | | | |
| | | | | | | Ser-295 to His-301, | | | |
| | | | | | | Tyr-307 to Gln-316, | | | |
| | | | | | | Glu-322 to Ser-330. | | | |
| 152 | HTTJQ27 | 1182680 | 162 | 1057-392 | 446 | Ile-150 to Lys-155, | AR061: 5, AR089: 2, | | |
| | | | | | | Glu-199 to Ala-207. | AR050: 2, AR054: 1, | | |
| | | | | | | | AR051: 0 | | |
| | | | | | | | S0250: 3, L0659: 3, | | |
| | | | | | | | H0038: 2, S0002: 2, | | |
| | | | | | | | S0330: 2, S0360: 1, | | |
| | | | | | | | H0604: 1, H0634: 1, | | |
| | | | | | | | H0379: 1, L0764: 1, | | |
| | | | | | | | L0766: 1, H0660: 1, | | |
| | | | | | | | S0380: 1 and L0751: 1. | | |
| | | 949312 | 274 | 1057-392 | 558 | Ile-150 to Lys-155, | | | |
| | | | | | | Glu-199 to Ala-207. | | | |
| 153 | HUJDA09 | 1153887 | 163 | 3-779 | 447 | Pro-1 to Asp-23, | AR089: 13, AR061: 3 | | |
| | | | | | | Ile-55 to Gly-81, | H0650: 1 and H0292: | | |
| | | | | | | Glu-150 to Glu-155, | 1. | | |
| | | | | | | Gly-194 to Gly-200. | | | |
| | | 951526 | 275 | 3-779 | 559 | Pro-1 to Asp-23, | | | |
| | | | | | | Ile-55 to Gly-81, | | | |
| | | | | | | Glu-150 to Gly-155, | | | |
| | | | | | | Gly-194 to Gly-200. | | | |
| 154 | HEOST94 | 954582 | 164 | 3-239 | 448 | Met-1 to Thr-8, | AR089: 11, AR061: 9 | | |
| | | | | | | Arg-65 to Asp-70. | H0253: 1, H0457: 1 | | |
| | | | | | | | and L0766: 1. | | |
| 155 | HUVHQ75 | 955032 | 165 | 2-547 | 449 | Gly-2 to Gly-8, | AR089: 5, AR061: 1 | | |
| | | | | | | Arg-54 to Arg-61, | H0031: 3, L0803: 3, | | |
| | | | | | | Val-79 to Gln-85, | S0028: 3, H0623: 2, | | |
| | | | | | | Lys-112 to Asn-121, | S0040: 1, H0341: 1, | | |
| | | | | | | Asp-153 to Tyr-161. | S0001: 1, S0420: 1, | | |
| | | | | | | | H0580: 1, T0040: 1, | | |
| | | | | | | | S0010: 1, S0346: 1, | | |
| | | | | | | | N0006: 1, S6028: 1, | | |
| | | | | | | | H0266: 1, H0328: 1, | | |
| | | | | | | | L0455: 1, H0124: 1, | | |
| | | | | | | | T0041: 1, S0210: 1, | | |
| | | | | | | | L0662: 1, H0144: 1, | | |
| | | | | | | | H0520: 1, S0152: 1, | | |
| | | | | | | | L0439: 1, L0757: 1, | | |
| | | | | | | | H0445: 1, L0366: 1, | | |
| | | | | | | | S0026: 1 and L0469: 1. | | |
| 156 | HWAGC08 | 1189787 | 166 | 1-1263 | 450 | Asn-36 to Leu-43, | AR089: 1, AR061: 1 | | |
| | | | | | | Cys-58 to Cys-69, | L0596: 4, L0758: 2, | | |
| | | | | | | Lys-164 to Gln-172, | H0392: 1, S0010: 1, | | |
| | | | | | | Arg-201 to Asp-213, | H0581: 1, H0038: 1, | | |
| | | | | | | Glu-227 to Thr-243, | L0761: 1, L0521: 1, | | |
| | | | | | | Lys-251 to Gly-264, | L0766: 1 and H0696: 1. | | |
| | | | | | | Ala-272 to Gln-280, | | | |
| | | | | | | Ser-287 to Ala-294, | | | |
| | | | | | | Pro-296 to Gln-324, | | | |
| | | | | | | Ser-333 to Val-338, | | | |
| | | | | | | Ser-357 to Thr-369, | | | |
| | | | | | | His-406 to Glu-412. | | | |
| | | 958139 | 276 | 1-432 | 560 | Asn-31 to Leu-38, | | | |
| | | | | | | Cys-53 to Cys-64, | | | |
| | | | | | | Gly-139 to Cys-144. | | | |
| 157 | HMWJI52 | 1202746 | 167 | 129-599 | 451 | | AR089: 117, AR061: 90 | | |
| | | | | | | | L0748: 11, L0439: 9, | | |
| | | | | | | | L0438: 7, H0556: 6, | | |
| | | | | | | | L0766: 4, L0754: 4, | | |
| | | | | | | | L0731: 4, S0222: 3, | | |
| | | | | | | | S0328: 3, S0418: 2, | | |
| | | | | | | | H0497: 2, H0156: 2, | | |
| | | | | | | | H0036: 2, H0009: 2, | | |
| | | | | | | | H0090: 2, T0041: 2, | | |
| | | | | | | | L0796: 2, L0809: 2, | | |
| | | | | | | | H0144: 2, L0740: 2, | | |
| | | | | | | | L0751: 2, L0750: 2 | | |
| | | | | | | | L0591: 2, S0134: 1, | | |
| | | | | | | | H0341: 1, S0442: 1, | | |
| | | | | | | | S0354: 1, S0132: 1, | | |
| | | | | | | | H0369: 1, H0550: 1, | | |
| | | | | | | | H0586: 1, H0486: 1, | | |
| | | | | | | | H0250: 1, H0575: 1, | | |
| | | | | | | | H0052: 1, H0046: 1, | | |
| | | | | | | | L0157: 1, H0057: 1, | | |
| | | | | | | | S0051: 1, H0375: 1, | | |
| | | | | | | | S0318: 1, S0316: 1, | | |
| | | | | | | | H0328: 1, H0615: 1, | | |
| | | | | | | | H0591: 1, H0413: 1, | | |
| | | | | | | | L0435: 1, L0806: 1, | | |
| | | | | | | | L0790: 1, S0126: 1, | | |
| | | | | | | | H0518: 1, S3012: 1, | | |
| | | | | | | | S3014: 1, L0745: 1, | | |
| | | | | | | | L0746: 1, L0756: 1, | | |
| | | | | | | | L0601: 1, H0667: 1, | | |
| | | | | | | | S0276: 1 and H0543: 1. | | |
| | | 961612 | 277 | 129-599 | 561 | | | | |
| 158 | HAABH11 | 1199572 | 168 | 1-447 | 452 | Ala-4 to Asp-9, | AR089: 16, AR061: 5 | | |
| | | | | | | Ser-14 to Ser-19, | L0740: 5, H0356: 2, | | |
| | | | | | | Glu-48 to Trp-55, | H0413: 2, L0770: 2, | | |
| | | | | | | Cys-76 to Trp-82, | L0777: 2, S0376: 1, | | |
| | | | | | | Leu-125 to Ser-135. | S0360: 1, H0646: 1, | | |
| | | | | | | | L0763: 1 and L0747: 1. | | |
| | | 965473 | 278 | 1-699 | 562 | | | | |
| 159 | HAPAI15 | 1187435 | 169 | 2-1357 | 453 | Glu-93 to Thr-98, | AR089: 1, AR061: 0 | | |
| | | | | | | Gln-131 to Tyr-138, | H0167: 10, H0543: 6, | | |
| | | | | | | Pro-239 to Ser-244, | H0584: 4, H0644: 4, | | |
| | | | | | | Glu-307 to Arg-322, | L0766: 4, H0341: 3, | | |
| | | | | | | Lys-332 to Phe-341, | H0031: 3, H0650: 2, | | |
| | | | | | | Glu-345 to Asn-352, | H0013: 2, H0042: 2, | | |
| | | | | | | Leu-358 to Met-365, | H0318: 2, H0581: 2, | | |
| | | | | | | Arg-372 to Leu-412, | H0328: 2, H0616: 2, | | |
| | | | | | | Gln-440 to Asn-450. | T0041: 2, T0042: 2, | | |
| | | | | | | | H0522: 2, L0777: 2, | | |
| | | | | | | | H0445: 2, L0596: 2, | | |
| | | | | | | | H0542: 2, H0677: 2, | | |
| | | | | | | | H0624: 1, H0265: 1, | | |
| | | | | | | | T0002: 1, S0134: 1, | | |
| | | | | | | | H0656: 1, S0282: 1, | | |
| | | | | | | | H0402: 1, H0580: 1, | | |
| | | | | | | | S0046: 1, H0497: 1, | | |
| | | | | | | | L0586: 1, H0250: 1, | | |
| | | | | | | | H0069: 1, S0346: 1, | | |
| | | | | | | | H0457: 1, H0050: 1, | | |
| | | | | | | | H0252: 1, L0456: 1, | | |
| | | | | | | | H0135: 1, H0591: 1, | | |
| | | | | | | | H0040: 1, H0063: 1, | | |
| | | | | | | | H0087: 1, H0551: 1, | | |
| | | | | | | | H0488: 1, H0413: 1, | | |
| | | | | | | | H0059: 1, H0429: 1, | | |
| | | | | | | | H0561: 1, S0002: 1, | | |
| | | | | | | | H0529: 1, L0761: 1, | | |
| | | | | | | | L0375: 1, L0783: 1, | | |
| | | | | | | | L0790: 1, H0144: 1, | | |
| | | | | | | | H0698: 1, H0520: 1, | | |
| | | | | | | | H0518: 1, H0521: 1, | | |
| | | | | | | | S0037: 1, S3014: 1, | | |
| | | | | | | | L0748: 1, H0444: 1, | | |
| | | | | | | | H0667: 1, H0423: 1, | | |
| | | | | | | | H0422: 1 and L0465: 1. | | |
| | | 965710 | 279 | 1-270 | 563 | Ala-1 to Trp-6, | | | |
| | | | | | | Glu-32 to Arg-47, | | | |
| | | | | | | Lys-57 to Phe-66, | | | |
| | | | | | | Glu-70 to Asn-77, | | | |
| | | | | | | Leu-83 to Met-90. | | | |
| | | 965711 | 280 | 157-1590 | 564 | Arg-1 to Glu-6. | | | |
| | | 975377 | 281 | 1-1101 | 565 | Glu-96 to Thr-101, | | | |
| | | | | | | Gln-134 to Tyr-141, | | | |
| | | | | | | Pro-242 to Ser-247, | | | |
| | | | | | | Glu-310 to Arg-325, | | | |
| | | | | | | Lys-335 to Phe-344, | | | |
| | | | | | | Glu-348 to Asn-355, | | | |
| | | | | | | Leu-361 to Lys-367. | | | |
| 160 | HNGBQ66 | 1172819 | 170 | 380-622 | 454 | Gly-7 to Leu-15, | AR089: 52, AR061: 12 | | |
| | | | | | | Gly-33 to Pro-38. | H0556: 1, H0346: 1, | | |
| | | | | | | | S0358: 1, H0090: 1, | | |
| | | | | | | | T0042: 1, H0560: 1, | | |
| | | | | | | | S0052: 1, H0519: 1 and | | |
| | | | | | | | S0152: 1. | | |
| | | 966001 | 282 | 252-1532 | 566 | Lys-34 to Ala-42, | | | |
| | | | | | | Lys-71 to Leu-76, | | | |
| | | | | | | Arg-188 to Trp-193, | | | |
| | | | | | | Val-215 to Asn-220, | | | |
| | | | | | | Ser-269 to Gln-274, | | | |
| | | | | | | Leu-333 to Lys-341, | | | |
| | | | | | | Thr-354 to Lys-361, | | | |
| | | | | | | Thr-401 to Ile-407, | | | |
| | | | | | | Lys-419 to Arg-427. | | | |
| 161 | HTXPY09 | 981988 | 171 | 312-632 | 455 | Ser-9 to Asn-15, | AR061: 1, AR089: 1 | | |
| | | | | | | Ser-64 to Gln-69, | H0581: 2, H0556: 1 | | |
| | | | | | | Leu-74 to Pro-81. | and H0538: 1 | | |
| | | 966013 | 283 | 312-617 | 567 | Ser-9 to Asn-15, | | | |
| | | | | | | Ser-64 to Gln 69. | | | |
| 162 | HCFLJ17 | 1193629 | 172 | 3-1139 | 456 | Glu-14 to Glu-24, | AR089: 4, AR061: 2 | | |
| | | | | | | Glu-38 to Ser-62, | L0758: 7, L0362: 5, | | |
| | | | | | | Ala-177 to Ala-198, | S0358: 4, L0766: 4, | | |
| | | | | | | Glu-235 to Arg-240, | L0754: 4, H0318: 3, | | |
| | | | | | | His-257 to Asp-375. | H0551: 3, H0529: 3, | | |
| | | | | | | | L0803: 3, H0519: 3, | | |
| | | | | | | | L0750: 3, L0777: 3, | | |
| | | | | | | | H0423: 3, H0650: 2, | | |
| | | | | | | | H0369: 2, H0575: 2, | | |
| | | | | | | | T0110: 2, S0003: 2, | | |
| | | | | | | | H0268: 2, L0770: 2, | | |
| | | | | | | | L0662: 2, L0375: 2, | | |
| | | | | | | | H0144: 2, S0374: 2, | | |
| | | | | | | | S0152: 2, L0780: 2, | | |
| | | | | | | | L0752: 2, L0731: 2, | | |
| | | | | | | | H0445: 2, L0596: 2, | | |
| | | | | | | | L0605: 2, L0599: 2, | | |
| | | | | | | | L0608: 2, H0543: 2, | | |
| | | | | | | | H0624: 1, H0170: 1, | | |
| | | | | | | | H0657: 1, H0402: 1, | | |
| | | | | | | | S0420: 1, S0360: 1, | | |
| | | | | | | | H0675: 1, S0045: 1, | | |
| | | | | | | | L0717: 1, H0600: 1, | | |
| | | | | | | | H0587: 1, H0497: 1, | | |
| | | | | | | | H0574: 1, H0098: 1, | | |
| | | | | | | | H0037: 1, L0105: 1, | | |
| | | | | | | | S0474: 1, H0581: 1, | | |
| | | | | | | | H0052: 1, H0544: 1, | | |
| | | | | | | | L0471: 1, H0060: 1, | | |
| | | | | | | | H0328: 1, H0622: 1, | | |
| | | | | | | | L0483: 1, L0055: 1, | | |
| | | | | | | | H0598: 1, H0090: 1, | | |
| | | | | | | | H0040: 1, H0413: 1, | | |
| | | | | | | | H0561: 1, L0638: 1, | | |
| | | | | | | | L0667: 1, L0646: 1, | | |
| | | | | | | | L0794: 1, L0774: 1, | | |
| | | | | | | | L0805: 1, L0655: 1, | | |
| | | | | | | | L0527: 1, L0657: 1, | | |
| | | | | | | | L0659: 1, L0526: 1, | | |
| | | | | | | | L0783: 1, L0666: 1, | | |
| | | | | | | | H0520: 1, H0690: 1, | | |
| | | | | | | | H0658: 1, H0660: 1, | | |
| | | | | | | | H0521: 1, H0555: 1, | | |
| | | | | | | | S0028: 1, L0742: 1, | | |
| | | | | | | | L0756: 1, S0192: 1, | | |
| | | | | | | | S0242: 1, S0194: 1 and | | |
| | | | | | | | S0276: 1. | | |
| | | 954723 | 284 | 1-423 | 568 | Thr-2 to Gln-9, | | | |
| | | | | | | Glu-19 to Glu-29, | | | |
| | | | | | | Glu-43 to Ser-67. | | | |
| | | 966294 | 285 | 3-1208 | 569 | Glu-14 to Glu-24, | | | |
| | | | | | | Glu-38 to Ser-62, | | | |
| | | | | | | Ala-177 to Ala-198, | | | |
| | | | | | | Glu-235 to Arg-240, | | | |
| | | | | | | His-257 to Lys-374. | | | |
| 163 | HGOCA12 | 1172054 | 173 | 359-985 | 457 | Ser-14 to Lys-24. | AR061: 210, AR089: | | |
| | | | | | | | 110 | | |
| | | | | | | | L0758: 3, S0364: 2, | | |
| | | | | | | | L0747: 2, S0278: 1, | | |
| | | | | | | | L0622: 1, H0018: 1, | | |
| | | | | | | | L0783: 1, L0809: 1, | | |
| | | | | | | | L0791: 1 and L0759: 1. | | |
| | | 968763 | 286 | 1-360 | 570 | | | | |
| | | 971583 | 287 | 518-240 | 571 | | | | |
| 164 | HCE5E94 | 1070802 | 174 | 2-688 | 458 | Lys-52 to Ser-61, | AR089: 1 | | |
| | | | | | | Thr-72 to Leu-77, | H0619: 5, L0439: 5, | | |
| | | | | | | Pro-98 to Gly-105, | L0770: 4, T0049: 2, | | |
| | | | | | | Leu-108 to Cys-116, | H0052: 2, H0544: 2, | | |
| | | | | | | Tyr-122 to Tyr-133, | H0268: 2, L0748: 2, | | |
| | | | | | | Leu-191 to Leu-200, | L0740: 2, L0749: 2, | | |
| | | | | | | Ala-214 to Thr-229. | L0756: 2, L0759: 2, | | |
| | | | | | | | H0624: 1, H0170: 1, | | |
| | | | | | | | H0662: 1, H0306: 1, | | |
| | | | | | | | S0420: 1, S0376: 1, | | |
| | | | | | | | S0045: 1, S0132: 1, | | |
| | | | | | | | S0278: 1, H0587: 1, | | |
| | | | | | | | H0574: 1, S0280: 1, | | |
| | | | | | | | H0599: 1, H0546: 1, | | |
| | | | | | | | H0124: 1, H0135: 1, | | |
| | | | | | | | H0163: 1, H0551: 1, | | |
| | | | | | | | H0264: 1, H0269: 1, | | |
| | | | | | | | H0413: 1, H0646: 1, | | |
| | | | | | | | S0208: 1, L0631: 1, | | |
| | | | | | | | L0761: 1, L0764: 1, | | |
| | | | | | | | L0662: 1, L0766: 1, | | |
| | | | | | | | L0803: 1, L0806: 1, | | |
| | | | | | | | L0805: 1, L0653: 1, | | |
| | | | | | | | L0659: 1, L0809: 1, | | |
| | | | | | | | L0666: 1, L0665: 1, | | |
| | | | | | | | L0438: 1, H0670: 1, | | |
| | | | | | | | H0518: 1, H0436: 1, | | |
| | | | | | | | S0037: 1, S0027: 1, | | |
| | | | | | | | L0743: 1, L0750: 1, | | |
| | | | | | | | L0777: 1, L0758: 1, | | |
| | | | | | | | H0595: 1, L0601: 1, | | |
| | | | | | | | H0423: 1 and H0506: 1. | | |
| | | 969287 | 288 | 270-410 | 572 | Ser-1 to Gly-8, | | | |
| | | | | | | Lys-14 to Pro-21, | | | |
| | | | | | | Ser-25 to Cys-33, | | | |
| | | | | | | Pro-37 to Gly-44. | | | |
| | | 969299 | 289 | 889-1386 | 573 | Pro-23 to Trp-28, | | | |
| | | | | | | Pro-35 to Lys-41, | | | |
| | | | | | | Gln-101 to Glu-110, | | | |
| | | | | | | Glu-122 to Gly-129. | | | |
| | | 971074 | 290 | 3-1097 | 574 | | | | |
| 165 | HNTAV78 | 971315 | 175 | 3-266 | 459 | Glu-52 to Leu-58, | AR054: 10, AR089: 2, | | |
| | | | | | | Arg-63 to Lys-71, | AR061: 1, AR051: 1, | | |
| | | | | | | Arg-83 to Val-88. | AR050: 1 | | |
| | | | | | | | H0305: 1, H0580: 1, | | |
| | | | | | | | H0428: 1, L0803: 1, | | |
| | | | | | | | L0809: 1 and H0519: 1. | | |
| 166 | HHEEL28 | 1216492 | 176 | 2-1849 | 460 | Glu-96 to Pro-106, | AR089: 1, AR061: 0 | | |
| | | | | | | Glu-148 to Ser-155, | L0766: 7, H0486: 4, | | |
| | | | | | | Pro-186 to Pro-193, | L0794: 4, H0520: 4, | | |
| | | | | | | Pro-212 to Glu-217, | L0754: 4, L0777: 4, | | |
| | | | | | | Pro-250 to Ser-256, | L0755: 4, L0599: 4, | | |
| | | | | | | Asp-278 to Leu-285, | L0803: 3, L0779: 3, | | |
| | | | | | | Ser-349 to Trp-356, | H0542: 3, H0624: 2, | | |
| | | | | | | Arg-358 to Gln-377, | S0418: 2, S0360: 2, | | |
| | | | | | | Arg-383 to Gly-399, | H0551: 2, L0770: 2, | | |
| | | | | | | Pro-407 to Ser-424, | L0662: 2, L0558: 2, | | |
| | | | | | | Arg-429 to Gln-439, | L0665: 2, H0144: 2, | | |
| | | | | | | Arg-461 to Val-466, | H0547: 2, H0519: 2, | | |
| | | | | | | Thr-482 to Gln-491, | H0522: 2, L0756: 2, | | |
| | | | | | | Gln-493 to Arg-498, | L0758: 2, L0588: 2, | | |
| | | | | | | Gly-502 to His-518, | H0170: 1, H0556: 1, | | |
| | | | | | | Met-530 to Ala-535, | H0657: 1, H0580: 1, | | |
| | | | | | | Pro-557 to His-562. | L0717: 1, S0222: 1, | | |
| | | | | | | | H0574;1, H0599: 1, | | |
| | | | | | | | S0474: 1, H0544: 1, | | |
| | | | | | | | H0266: 1, H0252: 1, | | |
| | | | | | | | T0023: 1, H0553: 1, | | |
| | | | | | | | T0042: 1, S0422: 1, | | |
| | | | | | | | L0369: 1, L0763: 1, | | |
| | | | | | | | L0761: 1, L0772: 1, | | |
| | | | | | | | L0521: 1, L0387: 1, | | |
| | | | | | | | L0650: 1, L0806: 1, | | |
| | | | | | | | L0653: 1, L0655: 1, | | |
| | | | | | | | L0789: 1, L0790: 1, | | |
| | | | | | | | L0663: 1, S0053: 1, | | |
| | | | | | | | S0374: 1, H0435: 1, | | |
| | | | | | | | H0670: 1, H0651: 1, | | |
| | | | | | | | H0521: 1, H0436: 1, | | |
| | | | | | | | H0345: 1, L0439: 1, | | |
| | | | | | | | L0745: 1, L0749: 1, | | |
| | | | | | | | L0750: 1, L0759: 1, | | |
| | | | | | | | L0485: 1, L0593: 1, | | |
| | | | | | | | S0026: 1, H0665: 1, | | |
| | | | | | | | H0543: 1, H0423: 1, | | |
| | | | | | | | H0422: 1 and S0458: 1. | | |
| | | 973096 | 291 | 1-378 | 575 | | | | |
| 167 | HE8UT58 | 973153 | 177 | 3-662 | 461 | | AR089: 8, AR061: 7 | | |
| | | | | | | | L0439: 4, L0751: 4, | | |
| | | | | | | | L0805: 3, H0674: 2, | | |
| | | | | | | | L0518: 2, L0809: 2, | | |
| | | | | | | | L0789: 2, L0731: 2, | | |
| | | | | | | | L0758: 2, H0661: 1, | | |
| | | | | | | | L0619: 1, S0358: 1, | | |
| | | | | | | | H0013: 1, H0156: 1, | | |
| | | | | | | | H0390: 1, H0544: 1, | | |
| | | | | | | | H0570: 1, S0051: 1, | | |
| | | | | | | | T0006: 1, H0032: 1, | | |
| | | | | | | | H0673: 1, S0036: 1, | | |
| | | | | | | | L0769: 1, L0800: 1, | | |
| | | | | | | | L0794: 1, L0803: 1, | | |
| | | | | | | | L0661: 1, L0636: 1, | | |
| | | | | | | | L0529: 1, L0543: 1, | | |
| | | | | | | | L0665: 1, H0521: 1, | | |
| | | | | | | | H0696: 1, H0694: 1, | | |
| | | | | | | | L0747: 1, L0779: 1, | | |
| | | | | | | | L0777: 1, L0752: 1 and | | |
| | | | | | | | H0352: 1. | | |
| 168 | HIBCN93 | 1178130 | 178 | 1300-569 | 462 | Met-26 to Asn-37, | AR089: 2, AR061: 1 | | |
| | | | | | | Glu-42 to Gln-51, | L0740: 12, L0439: 10, | | |
| | | | | | | Thr-68 to Ser-95, | L0766: 7, L0769: 4, | | |
| | | | | | | Ala-97 to Lys-113, | L0794: 4, L0756: 4, | | |
| | | | | | | Asp-156 to Val-161, | H0549: 3, L0768: 3, | | |
| | | | | | | Val-208 to Asp-215, | L0803: 3, L0665: 3, | | |
| | | | | | | Pro-217 to Ala-228. | S0206: 3, L0750: 3, | | |
| | | | | | | | H0423: 3, S0007: 2, | | |
| | | | | | | | S0010: 2, S0346: 2, | | |
| | | | | | | | H0052: 2, H0327: 2, | | |
| | | | | | | | H0024: 2, H0051: 2, | | |
| | | | | | | | L0763: 2, L0770: 2, | | |
| | | | | | | | H0144: 2, L0758: 2, | | |
| | | | | | | | H0556: 1, L0760: 1, | | |
| | | | | | | | S6026: 1, S0300: 1, | | |
| | | | | | | | H0550: 1, S0222: 1, | | |
| | | | | | | | H0392: 1, H0331: 1, | | |
| | | | | | | | H0013: 1, H0318: 1, | | |
| | | | | | | | S0049: 1, H0194: 1, | | |
| | | | | | | | H0103: 1, H0050: 1, | | |
| | | | | | | | L0471: 1, H0620: 1, | | |
| | | | | | | | H0373: 1, S0388: 1, | | |
| | | | | | | | T0010: 1, H0399: 1, | | |
| | | | | | | | H0553: 1, H0644: 1, | | |
| | | | | | | | H0032: 1, H0124: 1, | | |
| | | | | | | | H0068: 1, S0036: 1, | | |
| | | | | | | | H0135: 1, H0038: 1, | | |
| | | | | | | | H0616: 1, H0551: 1, | | |
| | | | | | | | T0067: 1, H0100: 1, | | |
| | | | | | | | H0560: 1, H0561: 1, | | |
| | | | | | | | L0662: 1, L0649: 1, | | |
| | | | | | | | L0774: 1, L0517: 1, | | |
| | | | | | | | L0809: 1, L0647: 1, | | |
| | | | | | | | L0789: 1, L0792: 1, | | |
| | | | | | | | L0352: 1, S0126: 1, | | |
| | | | | | | | H0539: 1, S0380: 1, | | |
| | | | | | | | H0518: 1, S0004: 1, | | |
| | | | | | | | S0044: 1, S3014: 1, | | |
| | | | | | | | L0748: 1, L0747: 1, | | |
| | | | | | | | L0686: 1, L0592: 1, | | |
| | | | | | | | S0196: 1 and H0352: 1. | | |
| | | 973679 | 292 | 207-938 | 576 | Met-26 to Asn-37, | | | |
| | | | | | | Glu-42 to Gln-51, | | | |
| | | | | | | Thr-68 to Ser-95, | | | |
| | | | | | | Ala-97 to Lys-113, | | | |
| | | | | | | Asp-156 to Val-161, | | | |
| | | | | | | Val-208 to Asp-215, | | | |
| | | | | | | Pro-217 to Ala-228. | | | |
| 169 | HDPBI30 | 974711 | 179 | 182-1312 | 463 | Asp-1 to Asn-10. | AR051: 3, AR050: 1, | | |
| | | | | | | | AR089: 1, AR061: 0 | | |
| | | | | | | | H0521: 3, H0656: 2, | | |
| | | | | | | | H0635: 2, H0549: 1, | | |
| | | | | | | | H0050: 1, H0413: 1, | | |
| | | | | | | | H0641: 1, L0387: 1, | | |
| | | | | | | | H0436: 1 and H0423: 1. | | |
| 170 | HLTGA03 | 974851 | 180 | 904-599 | 464 | Ala-9 to Phe-21. | AR051: 2, AR054: 2, | | |
| | | | | | | | AR089: 1, AR050: 1, | | |
| | | | | | | | AR061: 0 | | |
| | | | | | | | L0747: 18, L0748: 11, | | |
| | | | | | | | L0754: 10, L0749: 10, | | |
| | | | | | | | L0731: 10, L0752: 9, | | |
| | | | | | | | H0556: 8, L0438: 8, | | |
| | | | | | | | L0439: 8, L0740: 8, | | |
| | | | | | | | H0622: 7, H0521: 6, | | |
| | | | | | | | H0090: 5, H0038: 5, | | |
| | | | | | | | L0771: 5, L0809: 5, | | |
| | | | | | | | L0666: 5, L0663: 5, | | |
| | | | | | | | H0144: 5, L0756: 5, | | |
| | | | | | | | L0779: 5, L0755: 5, | | |
| | | | | | | | H0624: 4, H0013: 4, | | |
| | | | | | | | H0052: 4, H0620: 4, | | |
| | | | | | | | H0553: 4, H0135: 4, | | |
| | | | | | | | L0766: 4, L0803: 4, | | |
| | | | | | | | L0783: 4, L0741: 4, | | |
| | | | | | | | L0744: 4, L0750: 4, | | |
| | | | | | | | S0354: 3, H0393: 3, | | |
| | | | | | | | H0123: 3, S0426: 3, | | |
| | | | | | | | L0769: 3, L0662: 3, | | |
| | | | | | | | L0774: 3, L0805: 3, | | |
| | | | | | | | L0659: 3, L0665: 3, | | |
| | | | | | | | S0152: 3, H0555: 3, | | |
| | | | | | | | L0777: 3, L0753: 3, | | |
| | | | | | | | L0758: 3, L0759: 3, | | |
| | | | | | | | S0026: 3, H0265: 2, | | |
| | | | | | | | H0657: 2, S0358: 2, | | |
| | | | | | | | S0007: 2, H0369: 2, | | |
| | | | | | | | H0156: 2, L0021: 2, | | |
| | | | | | | | H0575: 2, H0618: 2, | | |
| | | | | | | | H0318: 2, H0251: 2, | | |
| | | | | | | | H0050: 2, H0012: 2, | | |
| | | | | | | | H0373: 2, S0250: 2, | | |
| | | | | | | | H0551: 2, H0412: 2, | | |
| | | | | | | | L0770: 2, L0641: 2, | | |
| | | | | | | | L0764: 2, L0768: 2, | | |
| | | | | | | | L0794: 2, L0804: 2, | | |
| | | | | | | | L0651: 2, L0517: 2, | | |
| | | | | | | | H0539: 2, S0146: 2, | | |
| | | | | | | | S3014: 2, L0745: 2, | | |
| | | | | | | | L0757: 2, L0592: 2, | | |
| | | | | | | | L0608: 2, H0677: 2, | | |
| | | | | | | | H0171: 1, S0202: 1, | | |
| | | | | | | | T0002: 1, S0040: 1, | | |
| | | | | | | | S0134: 1, H0583: 1, | | |
| | | | | | | | H0650: 1, S0212: 1, | | |
| | | | | | | | H0662: 1, S0418: 1, | | |
| | | | | | | | S0420: 1, S0360: 1, | | |
| | | | | | | | T0008: 1, H0329: 1, | | |
| | | | | | | | S0046: 1, H0619: 1, | | |
| | | | | | | | H0645: 1, H0411: 1, | | |
| | | | | | | | H0549: 1, H0550: 1, | | |
| | | | | | | | H0438: 1, H0592: 1, | | |
| | | | | | | | H0574: 1, H0486: 1, | | |
| | | | | | | | T0109: 1, H0036: 1, | | |
| | | | | | | | H0253: 1, S0346: 1, | | |
| | | | | | | | H0581: 1, H0194: 1, | | |
| | | | | | | | H0309: 1, L0040: 1, | | |
| | | | | | | | H0046: 1, H0457: 1, | | |
| | | | | | | | H0009: 1, L0471: 1, | | |
| | | | | | | | H0083: 1, H0099: 1, | | |
| | | | | | | | H0266: 1, H0188: 1, | | |
| | | | | | | | H0687: 1, H0284: 1, | | |
| | | | | | | | S0003: 1, S0214: 1, | | |
| | | | | | | | H0615: 1, H0428: 1, | | |
| | | | | | | | H0039: 1, H0030: 1, | | |
| | | | | | | | H0031: 1, H0644: 1, | | |
| | | | | | | | L0142: 1, H0674: 1, | | |
| | | | | | | | H0163: 1, H0591: 1, | | |
| | | | | | | | H0040: 1, H0616: 1, | | |
| | | | | | | | H0413: 1, H0056: 1, | | |
| | | | | | | | H0623: 1, T0069: 1, | | |
| | | | | | | | S0038: 1, S0144: 1, | | |
| | | | | | | | L0763: 1, L0761: 1, | | |
| | | | | | | | L0772: 1, L0372: 1, | | |
| | | | | | | | L0644: 1, L0767: 1, | | |
| | | | | | | | L0649: 1, L0650: 1, | | |
| | | | | | | | L0375: 1, L0784: 1, | | |
| | | | | | | | L0776: 1, L0655: 1, | | |
| | | | | | | | L0527: 1, L0384: 1, | | |
| | | | | | | | L0789: 1, L0790: 1, | | |
| | | | | | | | L0664: 1, S0374: 1, | | |
| | | | | | | | H0519: 1, S0126: 1, | | |
| | | | | | | | H0435: 1, H0659: 1, | | |
| | | | | | | | H0658: 1, H0648: 1, | | |
| | | | | | | | S0328: 1, H0522: 1, | | |
| | | | | | | | S0013: 1, H0696: 1, | | |
| | | | | | | | S0044: 1, S0176: 1, | | |
| | | | | | | | H0187: 1, H0626: 1, | | |
| | | | | | | | S0037: 1, L0751: 1, | | |
| | | | | | | | H0445: 1, L0589: 1, | | |
| | | | | | | | L0590: 1, L0595: 1, | | |
| | | | | | | | L0603: 1, L0366: 1, | | |
| | | | | | | | H0422: 1, H0506: 1 and | | |
| | | | | | | | H0352: 1. | | |
| | | 974852 | 293 | 176-349 | 577 | | | | |
| 171 | HFXJI27 | 971046 | 181 | 173-367 | 465 | Pro-48 to Leu-53. | AR089: 10, AR061: 7 | | |
| | | | | | | | L0754: 21, H0553: 10, | | |
| | | | | | | | H0574: 6, L0771: 5, | | |
| | | | | | | | L0598: 4, L0659: 4, | | |
| | | | | | | | L0663: 4, L0745: 4, | | |
| | | | | | | | L0731: 4, L0599: 4, | | |
| | | | | | | | S0414: 3, H0328: 3, | | |
| | | | | | | | L0776: 3, L0439: 3, | | |
| | | | | | | | L0756: 3, H0624: 2, | | |
| | | | | | | | S0358: 2, S0376: 2, | | |
| | | | | | | | S0444: 2, L0717: 2, | | |
| | | | | | | | H0596: 2, H0687: 2, | | |
| | | | | | | | H0615: 2, L0646: 2, | | |
| | | | | | | | L0662: 2, L0803: 2, | | |
| | | | | | | | L0774: 2, L0438: 2, | | |
| | | | | | | | H0670: 2, S0330: 2, | | |
| | | | | | | | H0478: 2, L0779: 2, | | |
| | | | | | | | L0777: 2, L0755: 2, | | |
| | | | | | | | S0260: 2, S0452: 2, | | |
| | | | | | | | H0171: 1, S0402: 1, | | |
| | | | | | | | H0583: 1, H0650: 1, | | |
| | | | | | | | H0341: 1, S0282: 1, | | |
| | | | | | | | H0638: 1, S0360: 1, | | |
| | | | | | | | S0132: 1, H0497: 1, | | |
| | | | | | | | H0632: 1, H0156: 1, | | |
| | | | | | | | H0575: 1, L0105: 1, | | |
| | | | | | | | H0052: 1, H0251: 1, | | |
| | | | | | | | H0545: 1, L0471: 1, | | |
| | | | | | | | H0012: 1, H0051: 1, | | |
| | | | | | | | H0510: 1, S0003: 1, | | |
| | | | | | | | S0214: 1, H0622: 1, | | |
| | | | | | | | H0124: 1, H0090: 1, | | |
| | | | | | | | H0591: 1, H0038: 1, | | |
| | | | | | | | H0616: 1, H0551: 1, | | |
| | | | | | | | T0067: 1, H0413: 1, | | |
| | | | | | | | L0065: 1, S0422: 1, | | |
| | | | | | | | UNKWN: 1, L0649: 1, | | |
| | | | | | | | L0378: 1, L0655: 1, | | |
| | | | | | | | L0517: 1, L0783: 1, | | |
| | | | | | | | L0666: 1, L0664: 1, | | |
| | | | | | | | L0665: 1, H0144: 1, | | |
| | | | | | | | S0374: 1, H0520: 1, | | |
| | | | | | | | H0519: 1, S0126: 1, | | |
| | | | | | | | H0684: 1, H0658: 1, | | |
| | | | | | | | H0666: 1, H0521: 1, | | |
| | | | | | | | L0746: 1, L0750: 1, | | |
| | | | | | | | L0786: 1, L0591: 1, | | |
| | | | | | | | L0485: 1, L0593: 1, | | |
| | | | | | | | S0026: 1, S0192: 1, | | |
| | | | | | | | S0242: 1, H0677: 1 and | | |
| | | | | | | | H0506: 1. | | |
| | | 975381 | 294 | 3-599 | 578 | His-1 to Thr-8, | | | |
| | | | | | | Val-11 to Tyr-20, | | | |
| | | | | | | Lys-89 to Arg-105, | | | |
| | | | | | | Gln-124 to His-131, | | | |
| | | | | | | Gln-147 to Ser-170. | | | |

[0038] The first column in Table 1A provides the gene number in the application corresponding to the clone identifier. The second column in Table 1A provides a unique “Clone ID NO:Z” for a cDNA clone related to each contig sequence disclosed in Table 1A. This clone ID references the cDNA clone which contains at least the 5′ most sequence of the assembled contig and at least a portion of SEQ ID NO:X was determined by directly sequencing the referenced clone. The reference clone may have more sequence than described in the sequence listing or the clone may have less. In the vast majority of cases, however, the clone is believed to encode a full-length polypeptide. In the case where a clone is not full-length, a full-length cDNA can be obtained by methods described elsewhere herein.

[0039] The third column in Table 1A provides a unique “Contig ID” identification for each contig sequence. The fourth column provides the “SEQ ID NO:” identifier for each of the contig polynucleotide sequences disclosed in Table 1A. The fifth column, “ORF (From-To)”, provides the location (i.e., nucleotide position numbers) within the polynucleotide sequence “SEQ ID NO:X” that delineate the preferred open reading frame (ORF) shown in the sequence listing and referenced in Table 1A, column 6, as SEQ ID NO:Y. Where the nucleotide position number “To” is lower than the nucleotide position number “From”, the preferred ORF is the reverse complement of the referenced polynucleotide sequence.

[0040] The sixth column in Table 1A provides the corresponding SEQ ID NO:Y for the polypeptide sequence encoded by the preferred ORF delineated in column 5. In one embodiment, the invention provides an amino acid sequence comprising, or alternatively consisting of, a polypeptide encoded by the portion of SEQ ID NO:X delineated by “ORF (From-To)”. Also provided are polynucleotides encoding such amino acid sequences and the complementary strand thereto.

[0041] Column 7 in Table 1A lists residues comprising epitopes contained in the polypeptides encoded by the preferred ORF (SEQ ID NO:Y), as predicted using the algorithm of Jameson and Wolf, (1988) Comp. Appl. Biosci. 4:181-186. The Jameson-Wolf antigenic analysis was performed using the computer program PROTEAN (Version 3.11 for the Power MacIntosh, DNASTAR, Inc., 1228 South Park Street Madison, Wis.). In specific embodiments, polypeptides of the invention comprise, or alternatively consist of, at least one, two, three, four, five or more of the predicted epitopes as described in Table 1A. It will be appreciated that depending on the analytical criteria used to predict antigenic determinants, the exact address of the determinant may vary slightly.

[0042] Column 8 in Table 1A provides an expression profile and library code: count for each of the contig sequences (SEQ ID NO:X) disclosed in Table 1A, which can routinely be combined with the information provided in Table 4 and used to determine the tissues, cells, and/or cell line libraries which predominantly express the polynucleotides of the invention. The first number in column 8 (preceding the colon), represents the tissue/cell source identifier code corresponding to the code and description provided in Table 4. For those identifier codes in which the first two letters are not “AR”, the second number in column 8 (following the colon) represents the number of times a sequence corresponding to the reference polynucleotide sequence was identified in the tissue/cell source. Those tissue/cell source identifier codes in which the first two letters are “AR” designate information generated using DNA array technology. Utilizing this technology, cDNAs were amplified by PCR and then transferred, in duplicate, onto the array. Gene expression was assayed through hybridization of first strand cDNA probes to the DNA array. cDNA probes were generated from total RNA extracted from a variety of different tissues and cell lines. Probe synthesis was performed in the presence of ³³P dCTP, using oligo(dT) to prime reverse transcription. After hybridization, high stringency washing conditions were employed to remove non-specific hybrids from the array. The remaining signal, emanating from each gene target, was measured using a Phosphorimager. Gene expression was reported as Phosphor Stimulating Luminescence (PSL) which reflects the level of phosphor signal generated from the probe hybridized to each of the gene targets represented on the array. A local background signal subtraction was performed before the total signal generated from each array was used to normalize gene expression between the different hybridizations. The value presented after “[array code]:” represents the mean of the duplicate values, following background subtraction and probe normalization. One of skill in the art could routinely use this information to identify normal and/or diseased tissue(s) which show a predominant expression pattern of the corresponding polynucleotide of the invention or to identify polynucleotides which show predominant and/or specific tissue and/or cell expression.

[0043] Column 9 in Table 1A provides a chromosomal map location for certain polynucleotides of the invention. Chromosomal location was determined by finding exact matches to EST and cDNA sequences contained in the NCBI (National Center for Biotechnology Information) UniGene database. Each sequence in the UniGene database is assigned to a “cluster”; all of the ESTs, cDNAs, and STSs in a cluster are believed to be derived from a single gene. Chromosomal mapping data is often available for one or more sequence(s) in a UniGene cluster; this data (if consistent) is then applied to the cluster as a whole. Thus, it is possible to infer the chromosomal location of a new polynucleotide sequence by determining its identity with a mapped UniGene cluster.

[0044] A modified version of the computer program BLASTN (Altshul et al., J. Mol. Biol. 215:403-410 (1990); and Gish and States, Nat. Genet. 3:266-272 (1993)) was used to search the UniGene database for EST or cDNA sequences that contain exact or near-exact matches to a polynucleotide sequence of the invention (the ‘Query’). A sequence from the UniGene database (the ‘Subject’) was said to be an exact match if it contained a segment of 50 nucleotides in length such that 48 of those nucleotides were in the same order as found in the Query sequence. If all of the matches that met this criteria were in the same UniGene cluster, and mapping data was available for this cluster, it is indicated in Table 1A under the heading “Cytologic Band”. Where a cluster had been further localized to a distinct cytologic band, that band is disclosed; where no banding information was available, but the gene had been localized to a single chromosome, the chromosome is disclosed.

[0045] Once a presumptive chromosomal location was determined for a polynucleotide of the invention, an associated disease locus was identified by comparison with a database of diseases which have been experimentally associated with genetic loci. The database used was the Morbid Map, derived from OMIM™ (supra). If the putative chromosomal location of a polynucleotide of the invention (Query sequence) was associated with a disease in the Morbid Map database, an OMIM reference identification number was noted in column 10, Table 1A, labelled “OMIM Disease Reference(s)”. Table 5 is a key to the OMIM reference identification numbers (column 1), and provides a description of the associated disease in Column 2.

TABLE 1B

| Clone ID | SEQ ID | CONTIG | BAC | SEQ ID | EXON |
|---|---|---|---|---|---|
| NO: Z | NO: X | ID: | ID: A | NO: B | From-To |
| HMSKF13 | 12 | 708207 | AC023891 | 579 | 1-32 |
| | | | | | 159-474 |
| | | | | | 659-1496 |
| | | | | | 2796-2957 |
| | | | | | 3160-3603 |
| | | | | | 5493-5676 |
| | | | | | 8391-8506 |
| | | | | | 8716-8880 |
| | | | | | 8891-9116 |
| | | | | | 9977-10703 |
| | | | | | 11326-12477 |
| HMSKF13 | 12 | 708207 | AC023891 | 580 | 1-169 |
| HLHCT68 | 14 | 764745 | AC010344 | 581 | 1-121 |
| | | | | | 2985-3815 |
| | | | | | 4282-4423 |
| HLHCT68 | 14 | 764745 | AC008496 | 582 | 1-96 |
| | | | | | 2321-2645 |
| | | | | | 5406-5532 |
| | | | | | 5545-5688 |
| | | | | | 6055-6205 |
| | | | | | 9065-9895 |
| | | | | | 10362-10503 |
| HLHCT68 | 14 | 764745 | AC010344 | 583 | 1-144 |
| HLHCT68 | 14 | 764745 | AC010344 | 584 | 1-2396 |
| HLHCT68 | 14 | 764745 | AC008496 | 585 | 1-1684 |
| HSSJM44 | 18 | 871067 | AC026352 | 586 | 1-2314 |
| HSSJM44 | 18 | 871067 | AC068755 | 587 | 1-2311 |
| HSSJM44 | 18 | 871067 | AC069443 | 588 | 1-2314 |
| HSSJM44 | 18 | 871067 | AC026352 | 589 | 1-430 |
| HSSJM44 | 18 | 871067 | AC068755 | 590 | 1-430 |
| HSSJM44 | 18 | 871067 | AC069443 | 591 | 1-430 |
| HLMDO95 | 26 | 928344 | AC020641 | 592 | 1-591 |
| | | | | | 627-2046 |
| HCEMY90 | 27 | 932927 | AC024242 | 593 | 1-274 |
| | | | | | 1243-1357 |
| | | | | | 1994-2270 |
| HCEMY90 | 27 | 932927 | AF214633 | 594 | 1-274 |
| | | | | | 1243-1357 |
| | | | | | 1994-2270 |
| HCEMY90 | 27 | 932927 | AC024242 | 595 | 1-232 |
| HCEMY90 | 27 | 932927 | AF214633 | 596 | 1-130 |
| HBGQN46 | 28 | 945370 | AF038458 | 597 | 1-630 |
| | | | | | 1311-1416 |
| | | | | | 2481-4022 |
| | | | | | 4952-5252 |
| | | | | | 6370-6479 |
| | | | | | 7623-8269 |
| HRODF07 | 30 | 952426 | AC023402 | 598 | 1-336 |
| HRODF07 | 30 | 952426 | AC011597 | 599 | 1-336 |
| HE8DL23 | 41 | 693641 | AL135999 | 600 | 1-63 |
| | | | | | 405-942 |
| | | | | | 1196-1502 |
| | | | | | 2152-6417 |
| | | | | | 6659-6755 |
| | | | | | 7033-7385 |
| | | | | | 7481-7535 |
| | | | | | 7647-8163 |
| | | | | | 8230-8492 |
| | | | | | 8590-9909 |
| | | | | | 10114-10360 |
| | | | | | 10420-10783 |
| | | | | | 10970-11960 |
| | | | | | 12018-13492 |
| | | | | | 14130-14528 |
| | | | | | 14563-15789 |
| HE8DL23 | 41 | 693641 | AL135999 | 601 | 1-410 |
| HACCH94 | 53 | 847143 | AL161458 | 602 | 1-1140 |
| HACCH94 | 53 | 847143 | AL161458 | 603 | 1-90 |
| | | | | | 5811-6312 |
| HE8AM04 | 65 | 871156 | AL031774 | 604 | 1-50 |
| | | | | | 653-725 |
| | | | | | 1150-1308 |
| | | | | | 1333-1455 |
| | | | | | 2269-2559 |
| | | | | | 3501-3804 |
| | | | | | 5007-5125 |
| | | | | | 6175-6302 |
| | | | | | 7148-7335 |
| | | | | | 7528-7651 |
| | | | | | 9888-10170 |
| | | | | | 10252-10407 |
| | | | | | 11442-11707 |
| | | | | | 14428-16375 |
| | | | | | 16690-20376 |
| | | | | | 20668-21969 |
| | | | | | 21986-26710 |
| | | | | | 28521-28830 |
| | | | | | 28970-29123 |
| | | | | | 29902-30040 |
| | | | | | 32282-32637 |
| | | | | | 33088-33347 |
| | | | | | 33353-33578 |
| | | | | | 34231-34609 |
| | | | | | 34931-35398 |
| | | | | | 39684-40049 |
| | | | | | 41912-42363 |
| | | | | | 42740-43003 |
| | | | | | 43570-44745 |
| | | | | | 46120-46437 |
| | | | | | 48252-48374 |
| | | | | | 48882-48976 |
| | | | | | 49047-49398 |
| | | | | | 50471-50599 |
| | | | | | 50820-50928 |
| | | | | | 51281-51572 |
| | | | | | 51740-51954 |
| | | | | | 56361-56634 |
| | | | | | 56904-57144 |
| HE8AM04 | 65 | 871156 | AL138825 | 605 | 1-50 |
| | | | | | 653-725 |
| | | | | | 1169-1487 |
| | | | | | 2288-2578 |
| | | | | | 3503-3806 |
| | | | | | 5009-5127 |
| | | | | | 6177-6304 |
| | | | | | 7150-7337 |
| | | | | | 7531-7654 |
| | | | | | 9900-10172 |
| | | | | | 10257-10332 |
| HE8AM04 | 65 | 871156 | AL138825 | 606 | 1-181 |
| HE8AM04 | 65 | 871156 | AL031774 | 607 | 1-117 |
| HE8AM04 | 65 | 871156 | AL138825 | 608 | 1-309 |
| HIBEF26 | 66 | 871533 | Z99716 | 609 | 1-54 |
| | | | | | 4060-4540 |
| | | | | | 4625-4819 |
| | | | | | 8967-9094 |
| | | | | | 9489-9787 |
| | | | | | 9908-10459 |
| | | | | | 10603-10741 |
| | | | | | 12152-12665 |
| | | | | | 13046-13140 |
| | | | | | 13458-13707 |
| | | | | | 14554-14649 |
| | | | | | 15645-15745 |
| | | | | | 16067-16249 |
| | | | | | 17272-17324 |
| | | | | | 17601-17925 |
| | | | | | 18108-18949 |
| | | | | | 19292-21535 |
| HIBEF26 | 66 | 871533 | Z99716 | 610 | 1-508 |
| HIBEF26 | 66 | 871533 | Z99716 | 611 | 1-500 |
| | | | | | 1098-1445 |
| | | | | | 1472-2706 |
| HOHBY04 | 71 | 888190 | AL133245 | 612 | 1-427 |
| | | | | | 479-789 |
| | | | | | 1587-1740 |
| | | | | | 3435-3548 |
| | | | | | 6909-6992 |
| | | | | | 8141-8476 |
| | | | | | 9693-10005 |
| | | | | | 12548-13021 |
| HOHBY04 | 71 | 888190 | AL133245 | 613 | 1-516 |
| HMKCH92 | 80 | 910936 | AC026206 | 614 | 1-52 |
| | | | | | 416-535 |
| | | | | | 1184-1340 |
| | | | | | 1502-1651 |
| | | | | | 4581-4649 |
| | | | | | 10517-10753 |
| | | | | | 10870-10987 |
| | | | | | 13190-13220 |
| HMKCH92 | 80 | 910936 | AC034192 | 615 | 1-52 |
| | | | | | 416-535 |
| | | | | | 1184-1338 |
| | | | | | 1500-1651 |
| | | | | | 4583-4659 |
| | | | | | 10526-10754 |
| | | | | | 10871-10957 |
| HMKCH92 | 80 | 910936 | AC022381 | 616 | 1-52 |
| | | | | | 416-535 |
| | | | | | 1184-1340 |
| | | | | | 1502-1651 |
| | | | | | 4583-4651 |
| | | | | | 10520-10756 |
| | | | | | 10873-10990 |
| | | | | | 13187-13217 |
| HMKCH92 | 80 | 910936 | AC026206 | 617 | 1-107 |
| HMKCH92 | 80 | 910936 | AC022381 | 618 | 1-107 |
| HWADD57 | 94 | 943039 | AC011492 | 619 | 1-303 |
| | | | | | 949-1648 |
| | | | | | 1913-2937 |
| | | | | | 3032-3231 |
| | | | | | 3325-3443 |
| | | | | | 4093-4485 |
| | | | | | 4777-4936 |
| | | | | | 5057-5548 |
| | | | | | 5650-5968 |
| HWADD57 | 94 | 943039 | AC011492 | 620 | 1-50 |
| | | | | | 852-907 |
| | | | | | 988-1407 |
| | | | | | 1584-1839 |
| | | | | | 2455-2586 |
| | | | | | 2689-2787 |
| HBGMZ39 | 96 | 947112 | AC008537 | 621 | 1-1186 |
| HBGMZ39 | 96 | 947112 | AC019337 | 622 | 1-1182 |
| HBGMZ39 | 96 | 947112 | AC008537 | 623 | 1-1993 |
| | | | | | 2105-2385 |
| | | | | | 2736-3068 |
| | | | | | 4364-4489 |
| | | | | | 6546-6781 |
| | | | | | 7025-8165 |
| HBGMZ39 | 96 | 947112 | AC019337 | 624 | 1-1991 |
| | | | | | 2103-2383 |
| | | | | | 2734-3066 |
| | | | | | 4360-4485 |
| | | | | | 6541-6776 |
| | | | | | 7021-8159 |
| HBGMZ39 | 96 | 947112 | AC008537 | 625 | 1-734 |
| | | | | | 767-1001 |
| HBGMZ39 | 96 | 947112 | AC019337 | 626 | 1-158 |
| | | | | | 291-565 |
| | | | | | 598-832 |
| HNTND64 | 104 | 954871 | AC025090 | 627 | 1-465 |
| HNTND64 | 104 | 954871 | AC025090 | 628 | 1-454 |
| HHAWC08 | 106 | 957942 | AL096870 | 629 | 1-916 |
| | | | | | 1032-1409 |
| | | | | | 1680-1766 |
| | | | | | 1866-2475 |
| | | | | | 3074-3393 |
| | | | | | 3538-3718 |
| | | | | | 4038-4438 |
| | | | | | 4643-4726 |
| | | | | | 4816-4925 |
| | | | | | 4972-6815 |
| HHAWC08 | 106 | 957942 | AL096870 | 630 | 1-1239 |
| | | | | | 1381-1480 |
| | | | | | 1568-1679 |
| | | | | | 1853-1983 |
| | | | | | 2020-2429 |
| | | | | | 2491-3011 |
| HHAWC08 | 106 | 957942 | AL096870 | 631 | 1-283 |
| | | | | | 975-1075 |
| | | | | | 1551-1641 |
| | | | | | 1837-1953 |
| | | | | | 3100-3362 |
| | | | | | 3825-3903 |
| HMTAV95 | 117 | 614936 | AL137000 | 632 | 1-47 |
| | | | | | 321-642 |
| | | | | | 2386-2508 |
| | | | | | 3316-3493 |
| | | | | | 4104-4572 |
| | | | | | 6015-6340 |
| | | | | | 6520-6573 |
| HMTAV95 | 117 | 614936 | AL137000 | 633 | 1-539 |
| HMTAV95 | 117 | 614936 | AL137000 | 634 | 1-510 |
| HE9RA75 | 122 | 766779 | AC009648 | 635 | 1-422 |
| | | | | | 1494-1584 |
| HE9RA75 | 122 | 766779 | AP002502 | 636 | 1-111 |
| | | | | | 1088-1198 |
| | | | | | 2267-2693 |
| HE9RA75 | 122 | 766779 | AP000788 | 637 | 1-111 |
| | | | | | 1088-1198 |
| | | | | | 2267-2693 |
| HE9RA75 | 122 | 766779 | AP000907 | 638 | 1-111 |
| | | | | | 1088-1198 |
| | | | | | 2267-2693 |
| HE9RA75 | 122 | 766779 | AC009648 | 639 | 1-2026 |
| HE9RA75 | 122 | 766779 | AP002502 | 640 | 1-2336 |
| HE9RA75 | 122 | 766779 | AP000788 | 641 | 1-2299 |
| HE9RA75 | 122 | 766779 | AP000907 | 642 | 1-2346 |
| HHFGP83 | 126 | 828162 | AC026348 | 643 | 1-62 |
| | | | | | 528-1080 |
| | | | | | 1104-1284 |
| | | | | | 1836-1940 |
| | | | | | 2308-2633 |
| HHFGP83 | 126 | 828162 | AC026329 | 644 | 1-102 |
| | | | | | 461-611 |
| | | | | | 3520-3678 |
| | | | | | 4094-4203 |
| | | | | | 4670-5222 |
| | | | | | 5246-5426 |
| | | | | | 5978-6082 |
| | | | | | 6450-6775 |
| | | | | | 8830-9053 |
| | | | | | 9755-10066 |
| | | | | | 10098-10279 |
| | | | | | 10355-10988 |
| | | | | | 12072-13795 |
| HCQCI06 | 146 | 915000 | AC068763 | 645 | 1-590 |
| | | | | | 819-1083 |
| HCQCI06 | 146 | 915000 | AC069223 | 646 | 1-362 |
| HCQCI06 | 146 | 915000 | AC068763 | 647 | 1-593 |
| HNFDO52 | 149 | 916260 | AC012307 | 648 | 1-1998 |
| HWMEV63 | 157 | 931154 | AC078816 | 649 | 1-1574 |
| HEOST94 | 164 | 954582 | AC021705 | 650 | 1-29 |
| | | | | | 360-495 |
| | | | | | 955-1079 |
| | | | | | 1492-1559 |
| | | | | | 1793-1954 |
| | | | | | 2109-2237 |
| | | | | | 8156-8313 |
| | | | | | 9088-9598 |
| | | | | | 9667-11499 |
| | | | | | 12012-12782 |
| | | | | | 13030-13154 |
| | | | | | 13230-13338 |
| | | | | | 13623-13713 |
| | | | | | 13851-13961 |
| | | | | | 14179-14392 |
| | | | | | 14455-14717 |
| | | | | | 14747-14846 |
| | | | | | 15926-17967 |
| HEOST94 | 164 | 954582 | AC006435 | 651 | 1-146 |
| | | | | | 176-327 |
| | | | | | 434-752 |
| | | | | | 857-2289 |
| | | | | | 2841-3106 |
| | | | | | 3207-3592 |
| | | | | | 3857-3983 |
| | | | | | 4462-4550 |
| | | | | | 4689-4800 |
| | | | | | 5071-5244 |
| | | | | | 5307-5574 |
| | | | | | 5604-5703 |
| | | | | | 6803-6986 |
| | | | | | 7207-8866 |
| HEOST94 | 164 | 954582 | AC021705 | 652 | 1-304 |
| HE8UT58 | 177 | 973153 | AC032004 | 653 | 1-120 |

[0046] Table 1B summarizes additional polynucleotides encompassed by the invention (including cDNA clones related to the sequences (Clone ID NO:Z), contig sequences (contig identifier (Contig ID:) contig nucleotide sequence identifiers (SEQ ID NO:X)), and genomic sequences (SEQ ID NO:B). The first column provides a unique clone identifier, “Clone ID NO:Z”, for a cDNA clone related to each contig sequence. The second column provides the sequence identifier, “SEQ ID NO:X”, for each contig sequence. The third column provides a unique contig identifier, “Contig ID:” for each contig sequence. The fourth column, provides a BAC identifier “BAC ID NO:A” for the BAC clone referenced in the corresponding row of the table. The fifth column provides the nucleotide sequence identifier, “SEQ ID NO:B” for a fragment of the BAC clone identified in column four of the corresponding row of the table. The sixth column, “Exon From-To”, provides the location (i.e., nucleotide position numbers) within the polynucleotide sequence of SEQ ID NO:B which delineate certain polynucleotides of the invention that are also exemplary members of polynucleotide sequences that encode polypeptides of the invention (e.g., polypeptides containing amino acid sequences encoded by the polynucleotide sequences delineated in column six, and fragments and variants thereof).

| | | SEQ | | | | Score/ | | |
|---|---|---|---|---|---|---|---|---|
| Clone ID | Contig | ID | Analysis | | PFam/NR Accession | Percent | | |
| NO: Z | ID: | NO: X | Method | PFam/NR Description | Number | Identity | NT From | NT To |
| HAJAU21 | 670606 | 182 | HMMER | PFAM: Adaptin N | PF01602 | 194.1 | 2 | 322 |
| | | | 2.1.1 | terminal region | | | | |
| | | | blastx.2 | gamma-adaptin precursor | pir\|A36680\|A36680 | 95% | 2 | 319 |
| | | | | mouse | | | | |
| HMSKF13 | 708207 | 12 | HMMER | PFAM: Fibronectin type | PF00041 | 10.64 | 98 | 193 |
| | | | 1.8 | III domain | | | | |
| HHPFV44 | 715770 | 183 | HMMER | PFAM: Tubulin | PF00091 | 51.05 | 332 | 415 |
| | | | 1.8 | | | | | |
| HLHCT68 | 764745 | 14 | HMMER | PFAM: Fibronectin type | PF00041 | 16.02 | 65 | 136 |
| | | | 1.8 | III domain | | | | |
| HTLAQ18 | 811792 | 15 | HMMER | PFAM: Fibronectin type | PF00041 | 31.34 | 56 | 331 |
| | | | 1.8 | III domain | | | | |
| | | | blastx.2 | hypothetical protein | pir\|T42656\|T42656 | 96% | 11% | 457 |
| | | | | DKFZp434H2215.1 - | | | | |
| | | | | human | | | | |
| HE6FD03 | 859840 | 184 | HMMER | PFAM: Double-stranded | PF00035 | 26.1 | 283 | 390 |
| | | | 2.1.1 | RNA binding motif | | | | |
| HEQAY32 | 869178 | 17 | HMMER | PFAM: Fibronectin type | PF00041 | 12.25 | 736 | 867 |
| | | | 1.8 | III domain | | | | |
| HSSJM44 | 871067 | 18 | HMMER | PFAM: Fibronectin type | PF00041 | 8.5 | 694 | 936 |
| | | | 1.8 | III domain | | | | |
| HOFMT55 | 1083824 | 19 | blastx.14 | (AF090119) caspase-1 | gi\|5669607\|gb\|AAD4 | 72% | 117 | 314 |
| | | | | [Equus caballus] | 6400.1\|AF090119_1 | 65% | 35 | 112 |
| | | | | | | 82% | 504 | 554 |
| | | | | | | 48% | 408 | 488 |
| HOFMT55 | 888552 | 185 | HMMER | PFAM: Caspase | PF00619 | 43 | 111 | 239 |
| | | | 2.1.1 | recruitment domain | | | | |
| HYAAU65 | 909956 | 20 | HMMER | PFAM: RasGEF domain | PF00617 | 47 | 2 | 112 |
| | | | 2.1.1 | | | | | |
| HAHEF22 | 910996 | 21 | HMMER | PFAM: Fibronectin type | PF00041 | 146.8 | 396 | 656 |
| | | | 2.1.1 | III domain | | | | |
| | | | blastx.2 | M-PROTEIN. | sp\|O55124\|O55124 | 43% | 3 | 803 |
| | | | | | | 28% | 3 | 779 |
| | | | | | | 25% | 90 | 683 |
| | | | | | | 40% | 396 | 686 |
| | | | | | | 29% | 306 | 686 |
| | | | | | | 31% | 3 | 365 |
| HPDVO67 | 1173157 | 22 | blastx.14 | (AC005954) ZO-3 [Homo | gi\|3851202\|gb\|AAC7 | 90% | 9 | 1004 |
| | | | | sapiens] | 2274.1\| | | | |
| HPDVO67 | 911405 | 186 | HMMER | PFAM: Guanylate kinase | PF00625 | 46.4 | 211 | 396 |
| | | | 2.1.1 | | | | | |
| | | | blastx.2 | ZO-3. | sp\|O95049\|O95049 | 88% | 1 | 726 |
| | | | | | | 59% | 629 | 784 |
| | | | | | | 68% | 690 | 755 |
| | | | | | | 50% | 387 | 446 |
| HFKKS58 | 1152246 | 23 | blastx.14 | (AK001121) unnamed | gi\|7022183\|dbj\|BAA9 | 98% | 386 | 1156 |
| | | | | protein product [Homo | 1511.1\| | 100% | 24 | 398 |
| | | | | sapiens] | | | | |
| HFKKS58 | 914398 | 187 | HMMER | PFAM: RNase3 domain. | PF00636 | 102.6 | 443 | 712 |
| | | | 2.1.1 | | | | | |
| HTFBE02 | 920507 | 188 | HMMER | PFAM: Isopentenyl- | PF01772 | 95.6 | 103 | 291 |
| | | | 2.1.1 | diphosphate delta- | | | | |
| | | | | isomerase | | | | |
| HCEOR02 | 921110 | 25 | HMMER | PFAM: Fibronectin type | PF00041 | 14.8 | 149 | 373 |
| | | | 1.8 | III domain | | | | |
| HLMDO95 | 928344 | 26 | HMMER | PFAM: 7 transmembrane | PF00001 | 43.25 | 220 | 369 |
| | | | 1.8 | receptor (rhodopsin | | | | |
| | | | | family) | | | | |
| | | | blastx.2 | Inflammation-related G | sp\|AAF91467\|AAF91 | 51% | 112 | 375 |
| | | | | protein-coupled receptor | 467 | 95% | 375 | 446 |
| | | | | EX33. | | | | |
| HCEMY90 | 932927 | 27 | HMMER | PFAM: PWWP domain | PF00855 | 48.7 | 67 | 234 |
| | | | 2.1.1 | | | | | |
| | | | blastx.2 | WHSC1 PROTEIN. | sp\|O96028\|O96028 | 62% | 67 | 585 |
| | | | | | | 65% | 546 | 605 |
| HBGQN46 | 945370 | 28 | HMMER | PFAM: Fibronectin type | PF00041 | 11 | 171 | 314 |
| | | | 1.8 | III domain | | | | |
| HTEPK69 | 951188 | 29 | HMMER | PFAM: TBC domain | PF00566 | 53.7 | 773 | 1135 |
| | | | 2.1.1 | | | | | |
| | | | blastx.2 | LYNCEIN | sp\|O97790\|O97790 | 92% | 290 | 1171 |
| | | | | (FRAGMENT). | | | | |
| HRODF07 | 952426 | 30 | HMMER | PFAM: Fibronectin type | PF00041 | 16.63 | 82 | 192 |
| | | | 1.8 | III domain | | | | |
| HUJDC24 | 953517 | 31 | HMMER | PFAM: TBC domain | PF00566 | 123.6 | 155 | 643 |
| | | | 2.1.1 | | | | | |
| | | | blastx.2 | LYNCEIN | sp\|O97790\|O97790 | 92% | 152 | 1099 |
| | | | | (FRAGMENT). | | | | |
| HNHCI32 | 861673 | 32 | HMMER | PFAM: 7 transmembrane | PF00001 | 133.17 | 195 | 545 |
| | | | 1.8 | receptor (rhodopsin | | | | |
| | | | | family) | | | | |
| | | | blastx.2 | G protein-coupled | sp\|AAF27279\|AAF27 | 100% | 189 | 551 |
| | | | | receptor 57. | 279 | 100% | 112 | 186 |
| | | | | | | 100% | 56 | 112 |
| HNHCI32 | 956105 | 189 | HMMER | PFAM: 7 transmembrane | PF00001 | 133.17 | 951 | 601 |
| | | | 1.8 | receptor (rhodopsin | | | | |
| | | | | family) | | | | |
| | | | blastx.2 | (AF112461) G protein- | gb\|AAF27279.1\|AF1 | 100% | 555 | 917 |
| | | | | coupled receptor 57 | 12461_1 | 100% | 478 | 552 |
| | | | | [Homo sapiens] | | 100% | 422 | 478 |
| HUVDR03 | 974684 | 190 | HMMER | PFAM: PWWP domain | PF00855 | 69.5 | 46 | 267 |
| | | | 2.1.1 | | | | | |
| HLTCT21 | 975033 | 34 | HMMER | PFAM: Death effector | PF01335 | 133.2 | 21 | 269 |
| | | | 2.1.1 | domain | | | | |
| | | | blastx.2 | CASP8 AND FADD- | sp\|O15519\|CFLA_H | 99% | 24 | 1181 |
| | | | | LIKE APOPTOSIS | UMAN | | | |
| | | | | REGULATOR | | | | |
| | | | | PRECURSOR 11111 | | | | |
| HLHGH34 | 575733 | 191 | HMMER | PFAM: C-5 cytosine- | PF00145 | 33.72 | 284 | 436 |
| | | | 1.8 | specific DNA methylases | | | | |
| | | | blastx.2 | PUTATIVE DNA | sp\|O43669\|O43669 | 100% | 2 | 436 |
| | | | | CYTOSINE | | | | |
| | | | | METHYLTRANSFERAS | | | | |
| | | | | E DNMT2. | | | | |
| HFXBN61 | 1172816 | 36 | blastx.14 | transmembrane receptor | gi\|2055392\|GB\|AAB5 | 97% | 9 | 233 |
| | | | | UNC5H1 [Rattus | 7678.1\| | | | |
| | | | | norvegicus] | | | | |
| HFXBN61 | 577367 | 192 | HMMER | PFAM: Death domain | PF00531 | 37.9 | 304 | 492 |
| | | | 2.1.1 | | | | | |
| | | | blastx.2 | TRANSMEMBRANE | sp\|O08721\|O08721 | 87% | 4 | 552 |
| | | | | RECEPTOR UNC5H1. | | | | |
| HSLFT94 | 1199828 | 37 | blastx.14 | phosphatidylglycerophosp | pir\|A30193\|PAECGB | 100% | 3 | 521 |
| | | | | hatase (EC 3.1.3.27) B - | | | | |
| | | | | Escherichia coli | | | | |
| HSLFT94 | 603023 | 193 | HMMER | PFAM: PAP2 superfamily | PF01569 | 72.8 | 15 | 302 |
| | | | 2.1.1 | | | | | |
| | | | blastx.2 | phosphatidylglycerophosp | pir\|A30193\|PAECGB | 100% | 3 | 314 |
| | | | | hatase (EC 3.1.3.27) B - | | | | |
| | | | | Escherichia coli | | | | |
| HELGW31 | 610003 | 38 | HMMER | PFAM: Cytochrome C | PF01578 | 216.5 | 672 | 1286 |
| | | | 2.1.1 | assembly protein | | | | |
| | | | blastx.2 | (AE000309) heme | gb\|AAC75259.1\| | 100% | 603 | 1337 |
| | | | | exporter protein C | | | | |
| | | | | [Escherichia coli] | | | | |
| HELGW31 | 957568 | 194 | HMMER | PFAM: Cytochrome C | PF01578 | 200.9 | 990 | 421 |
| | | | 2.1.1 | assembly protein | | | | |
| | | | blastx.2 | (AE000309) heme | gb\|AAC75259.1\| | 99% | 5 | 619 |
| | | | | exporter protein C | | 100% | 621 | 713 |
| | | | | [Escherichia coli] | | | | |
| HELGW31 | 964303 | 195 | blastx.2 | yejV [Escherichia coli] | gb\|AAA16392.1\| | 93% | 39 | 449 |
| | | | | | | 60% | 1 | 75 |
| HDJME16 | 661396 | 196 | HMMER | PFAM: FF domain | PF01846 | 53.7 | 34 | 183 |
| | | | 2.1.1 | | | | | |
| | | | blastx.2 | HUNTINGTON YEAST | sp\|Q9WVC9\|Q9WV | 84% | 1 | 486 |
| | | | | PARTNER C. | C9 | | | |
| HISAR63 | 683630 | 197 | HMMER | PFAM: A20-like zinc | PF01754 | 46.5 | 269 | 343 |
| | | | 2.1.1 | finger | | | | |
| HE8DL23 | 693641 | 41 | HMMER | PFAM: Adaptin N | PF01602 | 131.4 | 29 | 343 |
| | | | 2.1.1 | terminal region | | | | |
| | | | blastx.2 | GAMMA2-ADAPTIN. | sp\|O75504\|O75504 | 83% | 29 | 406 |
| | | | | | | 100% | 408 | 470 |
| HAJCL60 | 717266 | 198 | HMMER | PFAM: Tubulin/FtsZ | PF00091 | 140.9 | 187 | 474 |
| | | | 2.1.1 | family | | | | |
| HNGJI55 | 722240 | 43 | HMMER | PFAM: MaoC like | PF01575 | 117.2 | 16 | 285 |
| | | | 2.1.1 | domain | | | | |
| | | | blastx.2 | membrane protein maoC - | pir\|F64889\|F64889 | 100% | 1 | 282 |
| | | | | Escherichia coli | | | | |
| HNGJI55 | 868063 | 199 | HMMER | PFAM: MaoC like | PF01575 | 117.2 | 308 | 577 |
| | | | 2.1.1 | domain | | | | |
| HSDIF59 | 1207943 | 44 | blastx.14 | 4- | sp\|P75893\|P75893 | 98% | 309 | 875 |
| | | | | HYDROXYPHENYLAC | | | | |
| | | | | ETATE 3- | | | | |
| | | | | MONOOXYGENASE | | | | |
| | | | | (EC 1.14.13.3). | | | | |
| HSDIF59 | 739212 | 200 | HMMER | PFAM: Flavin reductase | PF01613 | 139.4 | 411 | 683 |
| | | | 2.1.1 | like domain | | | | |
| | | | blastx.2 | 4- | sp\|P75893\|P75893 | 90% | 294 | 740 |
| | | | | HYDROXYPHENYLAC | | | | |
| | | | | ETATE 3- | | | | |
| | | | | MONOOXYGENASE | | | | |
| | | | | (EC 1.14.13.3). | | | | |
| HKABW26 | 1127499 | 45 | blastx.14 | (AF201334) epsilon- | gi\|6457582\|gb\|AAF09 | 92% | 725 | 102 |
| | | | | tubulin [Homo sapiens] | 585.1\| | | | |
| HKABW26 | 740892 | 201 | HMMER | PFAM: Tubulin | PF00091 | 106.24 | 376 | 92 |
| | | | 1.8 | | | | | |
| HE9HE89 | 740893 | 202 | HMMER | PFAM: Tubulin | PF00091 | 202.53 | 44 | 694 |
| | | | 1.8 | | | | | |
| HEONO59 | 741361 | 47 | HMMER | PFAM: Fibronectin type | PF00041 | 39.4 | 508 | 582 |
| | | | 2.1.1 | III domain | | | | |
| | | | blastx.2 | HOST CELL FACTOR 2. | sp\|Q9Y5Z7\|Q9Y5Z7 | 99% | 331 | 702 |
| | | | | | | 74% | 29 | 253 |
| | | | | | | 97% | 707 | 847 |
| HE6BQ76 | 775616 | 48 | HMMER | PFAM: Double-stranded | PF00035 | 28.1 | 155 | 223 |
| | | | 2.1.1 | RNA binding motif | | | | |
| | | | blastx.2 | PROTEIN ACTIVATOR | sp\|O75569\|O75569 | 66% | 146 | 340 |
| | | | | OF THE INTERFERON- | | 94% | 109 | 159 |
| | | | | INDUCED PROTEIN | | | | |
| | | | | KINASE. | | | | |
| HDPYE27 | 789696 | 203 | HMMER | PFAM: A20-like zinc | PF01754 | 46.5 | 335 | 409 |
| | | | 2.1.1 | finger | | | | |
| HDPCN94 | 794275 | 204 | HMMER | PFAM: RhoGEF domain | PF00621 | 54.2 | 363 | 740 |
| | | | 2.1.1 | | | | | |
| HDPDH64 | 796509 | 51 | HMMER | PFAM: Adaptin N | PF01602 | 46.4 | 148 | 246 |
| | | | 2.1.1 | terminal region | | | | |
| HFIJC31 | 828148 | 52 | HMMER | PFAM: Fibronectin type | PF00041 | 22.67 | 138 | 404 |
| | | | 1.8 | III domain | | | | |
| HACCH94 | 847143 | 53 | HMMER | PFAM: 7 transmembrane | PF00001 | 167.94 | 10 | 735 |
| | | | 1.8 | receptor (rhodopsin | | | | |
| | | | | family) | | | | |
| | | | blastx.2 | ORPHAN G PROTEIN- | sp\|O95853\|O95853 | 99% | 7 | 879 |
| | | | | COUPLED RECEPTOR. | | | | |
| HSLAE47 | 1158024 | 54 | blastx.14 | endonuclease IV | gi\|146954\|gb\|AAA24 | 90% | 234 | 46 |
| | | | | [Escherichia coli] | 216.1\| | 91% | 362 | 222 |
| | | | | | | 100% | 445 | 398 |
| | | | | | | 66% | 59 | 24 |
| HSLAE47 | 847954 | 205 | HMMER | PFAM: AP endonuclease | PF01261 | 84.5 | 150 | 275 |
| | | | 2.1.1 | family 2 | | | | |
| HTEED80 | 849075 | 55 | HMMER | PFAM: Fibronectin type | PF00041 | 12.84 | 521 | 808 |
| | | | 1.8 | III domain | | | | |
| | | | blastx.2 | CDNA FLJ10688 FIS, | sp\|BAA91751\|BAA9 | 99% | 254 | 850 |
| | | | | CLONE NT2RP3000320, | 1751 | 80% | 1 | 267 |
| | | | | HIGHLY SIMILAR TO 11 | | | | |
| HNTBH68 | 1109052 | 56 | blastx.14 | (AK000307) unnamed | gi\|7020303\|dbj\|BAA9 | 60% | 11 | 514 |
| | | | | protein product [Homo | 1072.1\| | | | |
| | | | | sapiens] | | | | |
| HNTBH68 | 851274 | 206 | HMMER | PFAM: PAP2 superfamily | PF01569 | 50.6 | 16 | 420 |
| | | | 2.1.1 | | | | | |
| | | | blastx.2 | CDNA FLJ20300 FIS, | sp\|BAA91072\|BAA9 | 57% | 1 | 540 |
| | | | | CLONE HEP06465. | 1072 | | | |
| HAJBU67 | 1186051 | 57 | blastx.14 | (AF132951) CGI-17 | gi\|4680673\|gb\|AAD2 | 98% | 608 | 1402 |
| | | | | protein [Homo sapiens] | 7726.1\|AF132951_1 | 100% | 291 | 608 |
| HAJBU67 | 856922 | 207 | HMMER | PFAM: eRF1-like proteins | PF01605 | 28.1 | 514 | 606 |
| | | | 2.1.1 | | | | | |
| HE2OI42 | 857135 | 58 | HMMER | PFAM: Gelsolin repeat. | PF00626 | 151.6 | 1293 | 1421 |
| | | | 2.1.1 | | | | | |
| | | | blastx.2 | adseverin - bovine | pir\|A53209\|A53209 | 91% | 444 | 1562 |
| | | | | | | 77% | 64 | 405 |
| | | | | | | 29% | 609 | 1613 |
| | | | | | | 26% | 609 | 1613 |
| | | | | | | 36% | 199 | 354 |
| | | | | | | 81% | 17 | 49 |
| HISAR24 | 858494 | 208 | HMMER | PFAM: A20-like zinc | PF01754 | 46.5 | 50 | 124 |
| | | | 2.1.1 | finger | | | | |
| HMEKO39 | 863507 | 209 | HMMER | PFAM: PAP2 superfamily | PF01569 | 26.2 | 269 | 550 |
| | | | 2.1.1 | | | | | |
| | | | blastx.2 | CDNA FLJ20300 FIS, | sp\|BAA91072\|BAA9 | 49% | 2 | 619 |
| | | | | CLONE HEP06465. | 1072 | | | |
| H7TBC95 | 865922 | 61 | HMMER | PFAM: 7 transrmembrane | PF00001 | 189.5 | 3 | 695 |
| | | | 2.1.1 | receptor (rhodopsin | | | | |
| | | | | family) | | | | |
| | | | blastx.2 | G-protein coupled | sp\|BAA93001\|BAA9 | 56% | 516 | 701 |
| | | | | receptor SALPR. | 3001 | 61% | 51 | 206 |
| | | | | | | 41% | 303 | 440 |
| H7TBC95 | 908115 | 210 | HMMER | PFAM: 7 transmembrane | PF00001 | 189.5 | 3 | 695 |
| | | | 2.1.1 | receptor (rhodopsin | | | | |
| | | | | family) | | | | |
| | | | blastx.2 | angiotensin II receptor | gb\|AAC59635.1\| | 34% | 6 | 695 |
| | | | | [Xenopus laevis] | | | | |
| HPMBZ21 | 867222 | 62 | HMMER | PFAM: Gelsolin repeat. | PF00626 | 57.2 | 112 | 261 |
| | | | 2.1.1 | | | | | |
| | | | blastx.2 | WUGSC: H_DJ0722F20.1 | sp\|Q9Y6U3\|Q9Y6U3 | 93% | 34 | 462 |
| | | | | PROTEIN | | 38% | 88 | 408 |
| | | | | (FRAGMENT). | | | | |
| HLHTE91 | 789603 | 63 | HMMER | PFAM: Ubiquitin | PF00443 | 92.4 | 862 | 1068 |
| | | | 2.1.1 | carboxyl-terminal | | | | |
| | | | | hydrolase family 2 | | | | |
| | | | blastx.2 | DEUBIQUITINATING | sp\|Q9UNP0\|Q9UNP0 | 40% | 409 | 1077 |
| | | | | ENZYME. | | | | |
| HLHTE91 | 868803 | 211 | HMMER | PFAM: MYND finger | PF01753 | 33.7 | 393 | 521 |
| | | | 2.1.1 | | | | | |
| HTEPX32 | 1134915 | 64 | blastx.14 | testis nuclear RNA | gi\|673456\|emb\|CAA5 | 81% | 211 | 1065 |
| | | | | binding protein [Mus | 9168.1\| | 91% | 1066 | 1206 |
| | | | | musculus] | | 67% | 1178 | 1324 |
| | | | | | | 43% | 190 | 237 |
| HTEPX32 | 870698 | 213 | HMMER | PFAM: Double-stranded | PF00035 | 36 | 508 | 699 |
| | | | 1.8 | RNA binding motif | | | | |
| | | | blastx.2 | testis nuclear RNA | pir\|I48840\|I48840 | 87% | 190 | 699 |
| | | | | binding protein - mouse | | 80% | 716 | 1207 |
| | | | | | | 67% | 1179 | 1325 |
| HE8AM04 | 871156 | 65 | HMMER | PFAM: Flavin containing | PF01593 | 73.5 | 3 | 482 |
| | | | 2.1.1 | amine oxidase | | | | |
| | | | blastx.2 | R13G10.2 protein. | sp\|CAA84671\|CAA8 | 39% | 3 | 509 |
| | | | | | 4671 | | | |
| HIBEF26 | 871533 | 66 | HMMER | PFAM: Cell division | PF00735 | 175.3 | 2 | 382 |
| | | | 2.1.1 | protein | | | | |
| | | | blastx.2 | G-SEPTIN ALPHA. | sp\|Q9WU34\|Q9WU34 | 87% | 2 | 442 |
| HAOAE45 | 876157 | 214 | HMMER | PFAM: Riboflavin kinase/ | PF01687 | 30.3 | 255 | 341 |
| | | | 2.1.1 | FAD synthetase | | | | |
| | | | blastx.2 | cDNA FLJ11149 FIS, | sp\|BAA92033\|BAA9 | 86% | 234 | 458 |
| | | | | CLONE PLACE1006731. | 2033 | | | |
| HSDIT49 | 1169473 | 68 | blastx.14 | Deoxyribodipyrimidine | gi\|1651311\|dbj\|BAA3 | 94% | 457 | 873 |
| | | | | photolyase (EC 4.1.99.3) 1 | 5367.1\| | 61% | 821 | 898 |
| | | | | | | 100% | 904 | 927 |
| HSDIT49 | 881804 | 215 | HMMER | PFAM: DNA photolyase | PF00875 | 141.7 | 250 | 672 |
| | | | 2.1.1 | | | | | |
| HTLHP64 | 1189793 | 69 | blastx.14 | (AF068625) DNA | gi\|6449468\|gb\|AAC4 | 55% | 244 | 324 |
| | | | | cylosine-5 | 0177.2\| | 43% | 379 | 447 |
| | | | | methyltransferase 3A | | 56% | 472 | 519 |
| | | | | [Mus musculus] | | | | |
| HTLHP64 | 883120 | 216 | HMMER | PFAM: PWWP domain | PF00855 | 36.6 | 248 | 400 |
| | | | 2.1.1 | | | | | |
| HETKT65 | 887016 | 217 | HMMER | PFAM: TBC domain | PF00566 | 73.2 | 79 | 411 |
| | | | 2.1.1 | | | | | |
| | | | blastx.2 | WUGSC: H_DJ130H16.2 | sp\|O76053\|O76053 | 71% | 76 | 627 |
| | | | | PROTEIN | | 87% | 3 | 74 |
| | | | | (FRAGMENT). | | | | |
| HOHBY04 | 888190 | 71 | HMMER | PFAM: Inhibitor of | PF00653 | 90 | 244 | 393 |
| | | | 2.1.1 | Apoptosis domain | | | | |
| | | | blastx.2 | Ubiquitin-conjugating | sp\|AAF75772\|AAF75 | 86% | 238 | 738 |
| | | | | BIR-domain enzyme | 772 | 100% | 3 | 239 |
| | | | | APOLLON. | | 92% | 653 | 691 |
| HTFNP84 | 909687 | 72 | HMMER | PFAM: RhoGEF domain | PF00621 | 84.7 | 70 | 405 |
| | | | 2.1.1 | | | | | |
| | | | blastx.14 | ect2 [Mus musculus] | gi\|293332\|gb\|AAA37 | 91% | 73 | 1131 |
| | | | | | 536.1\| | 62% | 1042 | 1227 |
| | | | | | | 100% | 27 | 56 |
| | | | | | | 17% | 62 | 265 |
| HDQGZ78 | 909735 | 218 | HMMER | PFAM: RhoGEF domain | PF00621 | 85.2 | 5 | 277 |
| | | | 2.1.1 | | | | | |
| | | | blastx.14 | (AF038388) actin- | gi\|3342246\|gb\|AAC2 | 93% | 5 | 442 |
| | | | | filament binding protein | 7698.1\| | | | |
| | | | | Frabin [Rattus norvegicus] | | | | |
| HHEMD52 | 909742 | 74 | HMMER | PFAM: RhoGEF domain | PF00621 | 64.3 | 1295 | 1501 |
| | | | 2.1.1 | | | | | |
| | | | blastx.14 | (AF017369) faciogenital | gi\|3599942\|gb\|AAC3 | 70% | 998 | 1510 |
| | | | | dysplasia protein 3 [Mus | 5431.1\| | 62% | 854 | 982 |
| | | | | musculus] | | 100% | 1516 | 1545 |
| | | | | | | 80% | 815 | 844 |
| | | | | | | 77% | 1573 | 1599 |
| HODFD73 | 1171995 | 75 | blastx.14 | (AB016962) synGAP-b1 | gi\|4417207\|dbj\|BAA7 | 100% | 11 | 481 |
| | | | | [Rattus norvegicus] | 4972.1\| | | | |
| HODFD73 | 909812 | 219 | HMMER | PFAM: GTPase-activator | PF00616 | 34 | 190 | 390 |
| | | | 2.1.1 | protein for Ras-like | | | | |
| | | | | GTPase | | | | |
| | | | blastx.14 | (AB016962) synGAP-b1 | gi\|4417207\|dbj\|BAA7 | 98% | 4 | 480 |
| | | | | [Rattus norvegicus] | 4972.1\| | | | |
| HIBDE74 | 1081188 | 76 | blastx.14 | (AL035106) dJ998C11.1 | gi\|6562067\|emb\|CAB | 100% | 1338 | 847 |
| | | | | (similar to T-lymphona 1 | 62513.1\| | | | |
| HIBDE74 | 909876 | 221 | HMMER | PFAM: RhoGEF domain | PF00621 | 152.7 | 44 | 604 |
| | | | 2.1.1 | | | | | |
| | | | blastx.14 | (AB001770) PEM-2 | gi\|4107011\|dbj\|BAA3 | 58% | 428 | 628 |
| | | | | [Ciona savignyi] | 6290.1\| | 41% | 161 | 421 |
| | | | | | | 33% | 29 | 127 |
| HTAIF22 | 910040 | 77 | HMMER | PFAM: RhoGEF domain | PF00621 | 29.5 | 320 | 394 |
| | | | 2.1.1 | | | | | |
| | | | blastx.14 | (AL022271) similar to | gi\|3876654\|emb\|CAA | 64% | 281 | 397 |
| | | | | Guanine nucleotide | 18349.1\| | | | |
| | | | | exchange 111 this g | | | | |
| HUVFZ43 | 910860 | 78 | HMMER | PFAM: Dual specificity | PF00782 | 164.4 | 6 | 401 |
| | | | 2.1.1 | phosphatase, catalytic | | | | |
| | | | | domain | | | | |
| | | | blastx.2 | MAP kinase phosphatase. | sp\|BAA89534\|BAA8 | 56% | 3 | 494 |
| | | | | | 9534 | | | |
| HNTMB90 | 910934 | 79 | HMMER | PFAM: Fibronectin type | PF00041 | 71.5 | 204 | 470 |
| | | | 2.1.1 | III domain | | | | |
| | | | blastx.2 | Neighbor of Punc e 11 | sp\|AAF65930\|AAF65 | 35% | 87 | 515 |
| | | | | protein. | 930 | | | |
| HMKCH92 | 910936 | 80 | HMMER | PFAM: Fibronectin type | PF00041 | 75.15 | 174 | 443 |
| | | | 1.8 | III domain | | | | |
| | | | blastx.2 | NEURAL ADHESION | sp\|Q9UQ52\|Q9UQ52 | 93% | 102 | 680 |
| | | | | MOLECULE NB-3. | | 100% | 2 | 103 |
| | | | | | | 97% | 700 | 801 |
| | | | | | | 26% | 135 | 605 |
| | | | | | | 24% | 228 | 602 |
| HTELV86 | 910946 | 81 | HMMER | PFAM: Fibronectin type | PF00041 | 77.22 | 400 | 669 |
| | | | 1.8 | III domain | | | | |
| | | | blastx.14 | neural cell adhesion | gi\|1016012\|gb\|AAC5 | 96% | 1 | 918 |
| | | | | protein BIG-2 precursor | 2262.1\| | 68% | 960 | 1025 |
| | | | | [Rattus norvegicus] | | 92% | 926 | 967 |
| | | | | | | 66% | 22 | 75 |
| | | | | | | 28% | 1 | 171 |
| | | | | | | 55% | 1 | 54 |
| | | | | | | 28% | 286 | 399 |
| | | | | | | 42% | 10 | 93 |
| | | | | | | 44% | 280 | 354 |
| | | | | | | 33% | 274 | 390 |
| | | | | | | 33% | 286 | 357 |
| | | | | | | 100% | 1028 | 1054 |
| | | | | | | 42% | 184 | 225 |
| | | | | | | 100% | 1057 | 1077 |
| | | | | | | 28% | 658 | 741 |
| HNTAF23 | 910947 | 82 | HMMER | PFAM: Fibronectin type | PF00041 | 15.99 | 174 | 242 |
| | | | 1.8 | III domain | | | | |
| | | | blastx.2 | hypothetical protein | pir\|T46428\|T46428 | 60% | 84 | 242 |
| | | | | DKFZp434B2226.1 - | | | | |
| | | | | human (fragment) | | | | |
| HELHP01 | 916762 | 222 | HMMER | PFAM: Tubulin | PF00091 | 209.26 | 30 | 299 |
| | | | 1.8 | | | | | |
| HTLGH72 | 917526 | 223 | HMMER | PFAM: Peptide | PF01625 | 353 | 267 | 746 |
| | | | 2.1.1 | methionine sulfoxide | | | | |
| | | | | reductase | | | | |
| | | | blastx.2 | PEPTIDE METHIONINE | sp\|Q9UJ68\|Q9UJ68 | 99% | 72 | 776 |
| | | | | SULFOXIDE | | | | |
| | | | | REDUCTASE (EC | | | | |
| | | | | 1.8.4.6). | | | | |
| HHEND45 | 919630 | 224 | HMMER | PFAM: Double-stranded | PF00035 | 12.86 | 25 | 114 |
| | | | 1.8 | RNA binding motif | | | | |
| HMTAY52 | 921948 | 225 | HMMER | PFAM: Flavin containing | PF01593 | 78.3 | 224 | 451 |
| | | | 2.1.1 | amine oxidase | | | | |
| | | | blastx.2 | CDNA FLJ20746 FIS, | sp\|BAA91360\|BAA9 | 94% | 125 | 880 |
| | | | | CLONE HEP06040. | 1360 | 87% | 998 | 1093 |
| | | | | | | 77% | 883 | 963 |
| | | | | | | 68% | 975 | 1022 |
| HUCPS03 | 1158484 | 87 | blastx.14 | (AC004997) match to | gi\|3212997\|gb\|AAC2 | 100% | 2 | 751 |
| | | | | ESTs AA667999 | 3434.1\| | 93% | 925 | 1155 |
| | | | | (NID: g2626700), 111 | | 100% | 1139 | 1294 |
| | | | | (PID: g2815076), and Z79 | | 100% | 751 | 798 |
| | | | | | | 36% | 1255 | 1377 |
| | | | | | | 100% | 904 | 927 |
| | | | | | | 25% | 1260 | 1355 |
| HUCPS03 | 922118 | 226 | HMMER | PFAM: TBC domain | PF00566 | 145.6 | 47 | 535 |
| | | | 2.1.1 | | | | | |
| | | | blastx.2 | WUGSC: H_DJ130H16.2 | sp\|O76053\|O76053 | 93% | 2 | 1120 |
| | | | | PROTEIN | | | | |
| | | | | (FRAGMENT). | | | | |
| HNHNP81 | 928378 | 88 | HMMER | PFAM: 7 transmembrane | PF00001 | 58.09 | 233 | 511 |
| | | | 1.8 | receptor (rhodopsin | | | | |
| | | | | family) | | | | |
| | | | blastx.2 | OLFACTORY | sp\|Q9Z231\|Q9Z231 | 61% | 236 | 505 |
| | | | | RECEPTOR | | 52% | 502 | 618 |
| | | | | (FRAGMENT). | | | | |
| HFIDL68 | 928475 | 89 | HMMER | PFAM: 7 transmembrane | PF00001 | 50.42 | 8 | 319 |
| | | | 1.8 | receptor (rhodopsin | | | | |
| | | | | family) | | | | |
| | | | blastx.2 | CG5042 PROTEIN. | sp\|Q9VBP0\|Q9VBP0 | 38% | 8 | 397 |
| HTLAB16 | 1144562 | 90 | blastx.14 | (AK000753) unnamed | gi\|7021037\|dbj\|BAA9 | 58% | 228 | 473 |
| | | | | protein product [Homo | 1360.1\| | 52% | 590 | 772 |
| | | | | sapiens] | | 64% | 830 | 955 |
| | | | | | | 37% | 12% | 197 |
| | | | | | | 53% | 510 | 548 |
| HTLAB16 | 929948 | 227 | HMMER | PFAM: Flavin containing | PF01593 | 74.7 | 274 | 918 |
| | | | 2.1.1 | amine oxidase | | | | |
| | | | blastx.2 | CDNA FLJ20746 FIS, | sp\|BAA91360\|BAA9 | 49% | 217 | 945 |
| | | | | CLONE HEP06040. | 1360 | 35% | 1 | 186 |
| HOEEU57 | 1158765 | 91 | blastx.14 | skm-BOP2 [Mus | gi\|5870834\|gb\|AAC5 | 38% | 65 | 280 |
| | | | | musculus] | 3022.2\| | 23% | 290 | 445 |
| HOEEU57 | 932562 | 228 | HMMER | PFAM: MYND finger | PF01753 | 45.6 | 139 | 255 |
| | | | 2.1.1 | | | | | |
| | | | blastx.14 | skm-BOP2 [Mus | gi\|5870834\|gb\|AAC5 | 39% | 76 | 279 |
| | | | | musculus] | 3022.2\| | 41% | 556 | 750 |
| | | | | | | 22% | 289 | 552 |
| HNHCP79 | 941862 | 230 | HMMER | PFAM: 7 transmembrane | PF00001 | 118.47 | 2 | 670 |
| | | | 1.8 | receptor (rhodopsin | | | | |
| | | | | family) | | | | |
| | | | blastx. 14 | (AF102533) olfactory | gi\|3983394\|gb\|AAD1 | 55% | 2 | 658 |
| | | | | receptor F7 [Mus | 3325.1\| | | | |
| | | | | musculus] | | | | |
| HHSDL85 | 942246 | 93 | HMMER | PFAM: RasGEF domain | PF00617 | 31 | 2 | 55 |
| | | | 2.1.1 | | | | | |
| | | | blastx.2 | (AF053308) putative | gb\|AAC06257.1\| | 50% | 2 | 472 |
| | | | | guanine nucleotide | | | | |
| | | | | releasing factor | | | | |
| | | | | [Drosophila affinis] | | | | |
| HWADD57 | 943039 | 94 | HMMER | PFAM: GTPase-activator | PF00616 | 56.1 | 212 | 343 |
| | | | 2.1.1 | protein for Ras-like | | | | |
| | | | | GTPase | | | | |
| | | | blastx.14 | (AB016962) synGAP-b1 | gi\|4417207\|dbj\|BAA7 | 45% | 116 | 598 |
| | | | | [Rattus norvegicus] | 4972.1\| | 69% | 2 | 70 |
| | | | | | | 35% | 739 | 855 |
| HFKKN77 | 943757 | 95 | HMMER | PFAM: 7 transmembrane | PF00001 | 80.79 | 274 | 573 |
| | | | 1.8 | receptor (rhodopsin | | | | |
| | | | | family) | | | | |
| | | | blastx.2 | G-protein coupled | pir\|JC7289\|JC7289 | 82% | 160 | 714 |
| | | | | receptor, SREB3 - human | | | | |
| HBGMZ39 | 947112 | 96 | HMMER | PFAM: Cytochrome P450 | PF00067 | 59.5 | 509 | 372 |
| | | | 2.1.1 | | | | | |
| | | | blastx.2 | cytochrome P450 2B - | pir\|JT0676\|JT0676 | 43% | 563 | 372 |
| | | | | green monkey | | 43% | 299 | 168 |
| | | | | | | 40% | 165 | 121 |
| HTTCB17 | 948595 | 232 | HMMER | PFAM: Double-stranded | PF00035 | 90.3 | 1394 | 1203 |
| | | | 2.1.1 | RNA binding motif | | | | |
| | | | blastx.2 | spermatid perinuclear | emb\|CAA59167.1\| | 98% | 74 | 1969 |
| | | | | RNA binding protein | | | | |
| | | | | [Mus musculus] | | | | |
| HEQAP17 | 949358 | 98 | HMMER | PFAM: 7 transmembrane | PF00001 | 94.57 | 741 | 436 |
| | | | 1.8 | receptor (rhodopsin | | | | |
| | | | | family) | | | | |
| | | | blastx.2 | Orphan seven- | sp\|AAF59827\|AAF59 | 84% | 786 | 295 |
| | | | | transmembrane receptor. | 827 | | | |
| H2LAD53 | 952181 | 99 | HMMER | PFAM: Guanylate kinase | PF00625 | 69.8 | 1 | 177 |
| | | | 2.1.1 | | | | | |
| | | | blastx.2 | PALS1. | sp\|AAF63789\|AAF63 | 100% | 1 | 360 |
| | | | | | 789 | | | |
| HAMFD12 | 952438 | 235 | HMMER | PFAM: Guanine | PF00618 | 40.7 | 3 | 77 |
| | | | 2.1.1 | nucleotide exchange | | | | |
| | | | | factor for Ras-like | | | | |
| | | | | GTPases; N-terminal | | | | |
| | | | | motif | | | | |
| | | | blastx.14 | guanine nucleotide | gi\|193573\|gb\|AAA37 | 84% | 3 | 434 |
| | | | | dissociation stimulator | 714.1\| | | | |
| | | | | [Mus musculus] | | | | |
| HE2SY09 | 953828 | 236 | HMMER | PFAM: Adaptin N | PF01602 | 323 | 29 | 646 |
| | | | 2.1.1 | terminal region | | | | |
| | | | blastx.14 | alpha-adaptin (A) (AA | gi\|49878\|emb\|CAA33 | 96% | 2 | 646 |
| | | | | 1-977) [Mus musculus] | 096.1\| | | | |
| HWLLB11 | 954849 | 102 | HMMER | PFAM: Cytochrome P450 | PF00067 | 159.13 | 75 | 506 |
| | | | 1.8 | | | | | |
| | | | blastx.2 | CYTOCHROME P450 | sp\|Q9VA27\|Q9VA27 | 46% | 78 | 512 |
| | | | | 4C3 (EC 1.14.14.1) | | 44% | 4 | 75 |
| | | | | (CYPIVC3). | | | | |
| HNTEF53 | 954852 | 103 | HMMER | PFAM: Cytochrome P450 | PF00067 | 102.61 | 369 | 887 |
| | | | 1.8 | | | | | |
| | | | blastx.2 | prostaglandin omega- | pir\|S32315\|A29368 | 49% | 821 | 1714 |
| | | | | hydroxylase (EC | | 42% | 279 | 902 |
| | | | | 1.14.15.) cytochrome 1 | | 60% | 1705 | 1749 |
| HNTND64 | 954871 | 104 | HMMER | PFAM: Cytochrome P450 | PF00067 | 28.2 | 10 | 225 |
| | | | 2.1.1 | | | | | |
| | | | blastx.2 | cytochrome P450 - golden | pir\|I48164\|I48164 | 37% | 10 | 264 |
| | | | | hamster | | 47% | 261 | 329 |
| HFPFA83 | 955614 | 105 | HMMER | PFAM: 7 transmembrane | PF00001 | 107.6 | 316 | 681 |
| | | | 1.8 | receptor (rhodopsin | | | | |
| | | | | family) | | | | |
| | | | blastx.2 | G-protein coupled | pir\|JC7289\|JC7289 | 98% | 202 | 735 |
| | | | | receptor, SREB3 - human | | | | |
| HHAWC08 | 957942 | 106 | HMMER | PFAM: IMP | PF00478 | 231.99 | 361 | 978 |
| | | | 1.8 | dehydrogenase/GMP | | | | |
| | | | | reductase | | | | |
| | | | blastx.2 | Guanosine | sp\|BAA93080\|BAA9 | 100% | 334 | 975 |
| | | | | monophosphate reductase | 3080 | 100% | 975 | 1376 |
| | | | | isolog. | | | | |
| HBWBF71 | 1189778 | 107 | blastx.14 | (AF160893) | gi\|5679043\|gb\|AAD4 | 50% | 423 | 596 |
| | | | | BcDNA.GM10765 | 6833.1\|AF160893_1 | 50% | 260 | 418 |
| | | | | [Drosophila melanogaster] | | 43% | 113 | 229 |
| HBWBF71 | 963713 | 237 | HMMER | PFAM: XPG I-region | PF00867 | 62.6 | 368 | 577 |
| | | | 2.1.1 | | | | | |
| | | | blastx.14 | (AF160893) | gi\|5679043\|gb\|AAD4 | 50% | 320 | 529 |
| | | | | BcDNA.GM10765 | 6833.1\|AF160893_1 | 55% | 158 | 286 |
| | | | | [Drosophila melanogaster] | | 46% | 5 | 127 |
| HTLIT03 | 1152266 | 108 | blastx.14 | (AK000406) unnamed | gi\|7020473\|dbj\|BAA9 | 98% | 273 | 947 |
| | | | | protein product [Homo | 1143.1\| | 84% | 9 | 287 |
| | | | | sapiens] | | | | |
| HTLIT03 | 966870 | 238 | HMMER | PFAM: Double-stranded | PF00035 | 15.48 | 452 | 646 |
| | | | 1.8 | RNA binding motif | | | | |
| | | | blastx.2 | CDNA FLJ20399 FIS, | sp\|BAA91143\|BAA9 | 94% | 2 | 823 |
| | | | | CLONE KAT00581. | 1143 | | | |
| HSLFH12 | 970661 | 109 | HMMER | PFAM: AP endonuclease | PF01260 | 199.6 | 165 | 431 |
| | | | 2.1.1 | family 1 | | | | |
| | | | blastx.14 | exonuclease III | gi\|148277\|gb\|AAA24 | 94% | 144 | 431 |
| | | | | [Escherichia coli] | 767.1\| | 82% | 48 | 134 |
| | | | | | | 91% | 133 | 168 |
| | | | | | | 100% | 26 | 52 |
| HE8NI24 | 971296 | 110 | HMMER | PFAM: 7 transmembrane | PF00001 | 61.74 | 453 | 707 |
| | | | 1.8 | receptor (rhodopsin | | | | |
| | | | | family) | | | | |
| | | | blastx.2 | G-protein coupled | pir\|T47131\|T47131 | 93% | 345 | 707 |
| | | | | receptor, SREB2 - human | | 88% | 722 | 748 |
| HMTAX31 | 1154339 | 111 | blastx.14 | (AC018907) putative | gi\|6862915\|gb\|AAF30 | 42% | 235 | 534 |
| | | | | dual-specificity 1 | 304.1\|AC018907_4 | 30% | 118 | 243 |
| HMTAX31 | 971343 | 239 | HMMER | PFAM: Dual specificity | PF00782 | 176.8 | 1064 | 651 |
| | | | 2.1.1 | phosphatase, catalytic | | | | |
| | | | | domain | | | | |
| | | | blastx.2 | Mitogen-activated protein | sp\|AAF86649\|AAF86 | 100% | 1073 | 522 |
| | | | | kinase phosphatase x. | 649 | | | |
| HE8UY87 | 1171975 | 112 | blastx.14 | (AF124435) p55-related | gi\|5081459\|gb\|AAD3 | 54% | 4 | 276 |
| | | | | MAGUK protein DLG3 | 9392.1\|AF124435_1 | 46% | 369 | 497 |
| | | | | [Danio rerio] | | | | |
| HE8UY87 | 972359 | 240 | HMMER | PFAM: Guanylate kinase | PF00625 | 138 | 12 | 284 |
| | | | 2.1.1 | | | | | |
| | | | blastx.14 | (AF162685) DLGH2 | gi\|5524691\|gb\|AAD4 | 51% | 3 | 293 |
| | | | | protein [Mus musculus] | 4342.1\|AF162685_1 | 43% | 327 | 491 |
| HTPDV62 | 418671 | 241 | HMMER | PFAM: Guanylate kinase | PF00625 | 41.6 | 2 | 109 |
| | | | 2.1.1 | | | | | |
| | | | blastx.2 | guanylate kinase (EC | pir\|S68864\|S68864 | 100% | 2 | 109 |
| | | | | 2.7.4.8) 1 - human | | 95% | 200 | 268 |
| HMUBV12 | 549423 | 242 | HMMER | PFAM: Hyaluronidase | PF01630 | 50.7 | 196 | 303 |
| | | | 2.1.1 | | | | | |
| HMIAH32 | 1171989 | 115 | blastx.14 | Similar to a C.elegans | gi\|1665819\|dbj\|BAA1 | 75% | 58 | 711 |
| | | | | guanine nucleotide | 3406.1\| | | | |
| | | | | releasing factor Homolog | | | | |
| | | | | (S4 2368) [Homo sapiens] | | | | |
| HMIAH32 | 550977 | 243 | HMMER | PFAM: Guanine | PF00618 | 28.9 | 253 | 441 |
| | | | 2.1.1 | nucleotide exchange | | | | |
| | | | | factor for Ras-like | | | | |
| | | | | GTPases; N-terminal | | | | |
| | | | | motif | | | | |
| HSIDX67 | 558409 | 244 | HMMER | PFAM: XPA protein | PF01286 | 94.7 | 43 | 294 |
| | | | 2.1.1 | | | | | |
| HMTAV95 | 614936 | 117 | HMMER | PFAM: Fibronectin type | PF00041 | 11.91 | 6 | 182 |
| | | | 1.8 | III domain | | | | |
| | | | blastx.2 | CG4668 PROTEIN. | sp\|Q9VJJ8\|Q9VJJ8 | 37% | 6 | 281 |
| | | | | | | 28% | 320 | 361 |
| HCE3W04 | 1206659 | 118 | blastx.14 | TRAD. | sp\|Q9Y2A5\|Q9Y2A5 | 68% | 818 | 1096 |
| | | | | | | 63% | 539 | 820 |
| | | | | | | 65% | 1325 | 1465 |
| | | | | | | 56% | 1211 | 1306 |
| | | | | | | 66% | 145 | 171 |
| | | | | | | 38% | 503 | 556 |
| HCE3W04 | 615501 | 245 | HMMER | PFAM: RhoGEF domain | PF00621 | 46.1 | 535 | 804 |
| | | | 2.1.1 | | | | | |
| HMVAC92 | 731732 | 119 | HMMER | PFAM: MAGE family | PF01454 | 92.6 | 80 | 292 |
| | | | 2.1.1 | | | | | |
| HE8OU68 | 1086802 | 120 | blastx.14 | (AK001106) unnamed | gi\|7022163\|dbj\|BAA9 | 81% | 198 | 593 |
| | | | | protein product [Homo | 1506.1\| | 86% | 34 | 144 |
| | | | | sapiens] | | | | |
| HE8OU68 | 752519 | 246 | HMMER | PFAM: RasGEF domain | PF00617 | 120.3 | 301 | 594 |
| | | | 2.1.1 | | | | | |
| HMUBI80 | 766470 | 247 | HMMER | PFAM: Zn-finger in Ran | PF00641 | 34.3 | 46 | 135 |
| | | | 2.1.1 | binding protein and | | | | |
| | | | | others. | | | | |
| | | | blastx.2 | DEATH EFFECTOR | sp\|Q9UMW4\|Q9UM | 98% | 1 | 171 |
| | | | | DOMAIN-ASSOCIATED | W4 | 68% | 339 | 476 |
| | | | | FACTOR. | | 30% | 277 | 606 |
| HE9RA75 | 766779 | 122 | HMMER | PFAM: DIX domain | PF00778 | 55.8 | 62 | 247 |
| | | | 2.1.1 | | | | | |
| HOUHO89 | 1085594 | 123 | blastx.14 | (AJ236911) lsc protein | gi\|4454319\|emb\|CAA | 45% | 142 | 420 |
| | | | | [Rattus norvegicus] | 15426.1\| | 55% | 382 | 588 |
| | | | | | | 36% | 43 | 99 |
| HOUHO89 | 786548 | 248 | HMMER | PFAM: RhoGEE domain | PF00621 | 56 | 463 | 750 |
| | | | 2.1.1 | | | | | |
| HFITE38 | 1063475 | 124 | blastx.14 | dJ14O9.2 (Melanoma- | gi\|3319931\|emb\|CAB | 96% | 89 | 511 |
| | | | | Associated Antigen | 10841.1\| | 85% | 14 | 136 |
| | | | | MAGE LIKE) [Homo | | | | |
| | | | | sapiens] | | | | |
| HFITE38 | 793203 | 249 | HMMER | PFAM: MAGE family | PF01454 | 47.4 | 176 | 349 |
| | | | 2.1.1 | | | | | |
| | | | blastx.2 | DJ14O9.2 | sp\|O76058\|O76058 | 92% | 89 | 352 |
| | | | | (MELANOMA- | | 85% | 14 | 136 |
| | | | | ASSOCIATED | | | | |
| | | | | ANTIGEN MAGE | | | | |
| | | | | LIKE). | | | | |
| HSXCB49 | 800501 | 125 | HMMER | PFAM: Interferon | PF00143 | 24.1 | 447 | 373 |
| | | | 2.1.1 | alpha/beta domain | | | | |
| HSXCB49 | 909820 | 250 | blastx.14 | IFN- | gi\|490347\|emb\|CAA0 | 60% | 278 | 352 |
| | | | | omega1/alpha2(Bg1II) | 0297.1\| | 55% | 65 | 145 |
| | | | | [synthetic construct] | | 34% | 153 | 230 |
| | | | | | | 76% | 360 | 398 |
| | | | | | | 41% | 193 | 243 |
| HHFGP83 | 828162 | 126 | HMMER | PFAM: Fibronectin type | PF00041 | 34.53 | 68 | 271 |
| | | | 1.8 | III domain | | | | |
| | | | blastx.2 | CDO protein - human | pir\|T03097\|T03097 | 68% | 68 | 265 |
| | | | | | | 55% | 258 | 317 |
| HPLBP54 | 849732 | 251 | HMMER | PFAM: dUTPase | PF00692 | 26.6 | 162 | 302 |
| | | | 2.1.1 | | | | | |
| HCE4R40 | 858456 | 128 | HMMER | PFAM: Cell division | PF00735 | 38.1 | 68 | 391 |
| | | | 2.1.1 | protein | | | | |
| | | | blastx.2 | Sep2 (Fragment). | sp\|AAG09408\|AAG0 | 77% | 113 | 412 |
| | | | | | 9408 | 100% | 10 | 69 |
| HRABU93 | 1206777 | 129 | blastx.14 | Sep2 (Fragment). | sp\|AAG09408\|AAG0 | 97% | 911 | 1615 |
| | | | | | 9408 | 83% | 265 | 579 |
| | | | | | | 65% | 1688 | 1852 |
| | | | | | | 20% | 962 | 1048 |
| HRABU93 | 867220 | 252 | HMMER | PFAM: Cell division | PF00735 | 74.6 | 343 | 597 |
| | | | 2.1.1 | protein | | | | |
| | | | blastx.2 | Sep2 (Fragment). | sp\|AAG09408\|AAG0 | 92% | 253 | 609 |
| | | | | | 9408 | 78% | 603 | 644 |
| HWLQH41 | 883977 | 253 | HMMER | PFAM: Poly(ADP-ribose) | PF00644 | 389.4 | 79 | 858 |
| | | | 2.1.1 | polymerase catalytic | | | | |
| | | | | region. | | | | |
| HMJAH61 | 883978 | 254 | HMMER | PFAM: Poly(ADP-ribose) | PF00644 | 319.1 | 52 | 687 |
| | | | 2.1.1 | polymerase catalytic | | | | |
| | | | | region. | | | | |
| HBMXU88 | 887636 | 255 | HMMER | PFAM: Caspase | PF00619 | 28.8 | 483 | 689 |
| | | | 2.1.1 | recruitment domain | | | | |
| HNTCI60 | 890754 | 256 | HMMER | PFAM: PWWP domain | PF00855 | 68.3 | 5 | 226 |
| | | | 2.1.1 | | | | | |
| HTLDS55 | 1182304 | 134 | blastx.14 | (AF189713) MLL septin- | gi\|6683817\|gb\|AAF23 | 59% | 323 | 1048 |
| | | | | like fusion protein MSF-A | 374.1\| | 74% | 179 | 319 |
| | | | | [Homo sapiens] | | 37% | 17 | 88 |
| HTLDS55 | 891322 | 257 | HMMER | PFAM: Cell division | PF00735 | 454.7 | 233 | 1069 |
| | | | 2.1.1 | protein | | | | |
| | | | blastx.2 | (AJ250723) septin-like | emb\|CAB59833.1\| | 63% | 131 | 1054 |
| | | | | protein Sint1 [Mus | | | | |
| | | | | musculus] | | | | |
| HWMAE53 | 1187258 | 135 | blastx.14 | similar to Src homology | gi\|5824391\|emb\|CAB | 37% | 130 | 429 |
| | | | | domain 3; cDNA EST 11 | 05124.2\| | | | |
| | | | | elegans] | | | | |
| HWMAE53 | 909877 | 258 | HMMER | PFAM: RhoGEF domain | PF00621 | 53 | 112 | 267 |
| | | | 2.1.1 | | | | | |
| | | | blastx.14 | (AF132481) Ese1L | gi\|4378891\|gb\|AAD1 | 44% | 112 | 285 |
| | | | | protein [Mus musculus] | 9749.1\| | | | |
| HTODG16 | 1057155 | 136 | blastx.14 | (AK001106) unnamed | gi\|7022163\|dbj\|BAA9 | 100% | 1 | 564 |
| | | | | protein product [Homo | 1506.1\| | 60% | 557 | 586 |
| | | | | sapiens] | | | | |
| HTODG16 | 909952 | 259 | HMMER | PFAM: RasGEF domain | PF00617 | 148.5 | 4 | 402 |
| | | | 2.1.1 | | | | | |
| | | | blastx.14 | CDC25 [Saccharomyces | gi\|171187\|gb\|AAA34 | 34% | 13 | 399 |
| | | | | kluyveri] | 479.1\| | | | |
| HFXCG28 | 909961 | 260 | HMMER | PFAM: RasGEF domain | PF00617 | 162.7 | 225 | 593 |
| | | | 2.1.1 | | | | | |
| | | | blastx.14 | (AL080117) hypothetical | gi\|5262547\|emb\|CAB | 98% | 225 | 593 |
| | | | | protein [Homo sapiens] | 45716.1\| | 50% | 149 | 220 |
| HFTCU45 | 910053 | 138 | HMMER | PFAM: RhoGEF domain | PF00621 | 80.9 | 82 | 474 |
| | | | 2.1.1 | | | | | |
| | | | blastx.14 | Trio [Homo sapiens] | gi\|3522970\|gb\|AAC3 | 70% | 1 | 501 |
| | | | | | 4245.1\| | 41% | 34 | 387 |
| | | | | | | 35% | 421 | 540 |
| | | | | | | 57% | 488 | 529 |
| HFTBL33 | 1222661 | 139 | blastx.14 | TRAD. | sp\|Q9Y2A5\|Q9Y2A5 | 68% | 1343 | 1065 |
| | | | | | | 63% | 1622 | 1341 |
| | | | | | | 65% | 836 | 696 |
| | | | | | | 56% | 950 | 855 |
| | | | | | | 66% | 2015 | 1989 |
| | | | | | | 38% | 1658 | 1605 |
| HFTBL33 | 910055 | 261 | HMMER | PFAM: RhoGEF domain | PF00621 | 40.3 | 223 | 387 |
| | | | 2.1.1 | | | | | |
| | | | blastx.14 | (AF091395) Trio isoform | gi\|3644048\|gb\|AAC4 | 60% | 199 | 483 |
| | | | | [Homo sapiens] | 3042.1\| | 61% | 31 | 207 |
| | | | | | | 52% | 703 | 840 |
| | | | | | | 67% | 586 | 687 |
| | | | | | | 33% | 598 | 786 |
| | | | | | | 42% | 334 | 483 |
| | | | | | | 31% | 37 | 189 |
| | | | | | | 47% | 199 | 267 |
| | | | | | | 35% | 1128 | 1187 |
| | | | | | | 46% | 1175 | 1219 |
| HCEPH84 | 1148128 | 140 | blastx.14 | (AB027004) protein | gi\|6692782\|dbj\|BAA8 | 57% | 827 | 561 |
| | | | | phosphatase [Homo | 9412.1\| | 51% | 965 | 843 |
| | | | | sapiens] | | | | |
| HCEPH84 | 910864 | 262 | HMMER | PFAM: Dual specificity | PF00782 | 136.4 | 1158 | 727 |
| | | | 2.1.1 | phosphatase, catalytic | | | | |
| | | | | domain | | | | |
| | | | blastx.2 | PROTEIN | sp\|Q9UII6\|Q9UII6 | 50% | 1251 | 757 |
| | | | | PHOSPHATASE. | | | | |
| HHFON19 | 910891 | 263 | HMMER | PFAM: Dual specificity | PF00782 | 154.8 | 316 | 732 |
| | | | 2.1.1 | phosphatase, catalytic | | | | |
| | | | | domain | | | | |
| | | | blastx.14 | (AF143321) unknown | gi\|4929222\|gb\|AAD3 | 68% | 298 | 825 |
| | | | | [Homo sapiens] | 3910.1\|AF143321_1 | | | |
| HEMCL65 | 910900 | 142 | HMMER | PFAM: Fibronectin type | PF00041 | 22.41 | 93 | 278 |
| | | | 1 .8 | III domain | | | | |
| | | | blastx.2 | ROUNDABOUT 1. | sp\|Q9Y6N7\|Q9Y6N7 | 41% | 9 | 311 |
| | | | | | | 47% | 311 | 373 |
| HMAMB94 | 910909 | 143 | HMMER | PFAM: Fibronectin type | PF00041 | 73.7 | 234 | 497 |
| | | | 2.1.1 | III domain | | | | |
| | | | blastx.2 | CG4668 PROTEIN. | sp\|Q9VJJ8\|Q9VJJ8 | 36% | 45 | 551 |
| | | | | | | 25% | 3 | 638 |
| | | | | | | 30% | 54 | 557 |
| | | | | | | 29% | 96 | 575 |
| HFICR59 | 1171979 | 144 | blastx.14 | (AF162130) MAGUK | gi\|6997272\|gb\|AAD4 | 100% | 20 | 739 |
| | | | | protein TEM-61 [Homo | 5919.2\|AF162130_1 | | | |
| | | | | sapiens] | | | | |
| HFICR59 | 911317 | 264 | HMMER | PFAM: Guanylate kinase | PF00625 | 141.3 | 221 | 493 |
| | | | 2.1.1 | | | | | |
| | | | blastx.2 | MAGUK protein VAM-1. | sp\|AAD45919\|AAD4 | 100% | 2 | 721 |
| | | | | | 5919 | | | |
| HSXDD55 | 911460 | 145 | HMMER | PFAM: RasGEF domain | PF00617 | 146.2 | 333 | 695 |
| | | | 2.1.1 | | | | | |
| | | | blastx.14 | similar to phorbol ester | gi\|3876235\|emb\|CAA | 38% | 285 | 608 |
| | | | | and DAG binding domain; | 94755.1\| | 56% | 857 | 904 |
| | | | | 1 | | | | |
| HCQCI06 | 915000 | 146 | HMMER | PFAM: Fibronectin type | PF00041 | 24.42 | 6 | 191 |
| | | | 1.8 | III domain | | | | |
| | | | blastx.2 | hypothetical protein | pir\|T17344\|T17344 | 99% | 3 | 596 |
| | | | | DKFZp586L2024.1 - | | 100% | 593 | 646 |
| | | | | human (fragment) | | | | |
| HPMLJ44 | 915069 | 265 | HMMER | PFAM: A20-like zinc | PF01754 | 46.5 | 395 | 469 |
| | | | 2.1.1 | finger | | | | |
| | | | blastx.14 | (AF061739) unknown | gi\|4335943\|gb\|AAD1 | 74% | 545 | 802 |
| | | | | [Homo sapiens] | 7528.1\| | 100% | 365 | 517 |
| | | | | | | 75% | 786 | 845 |
| | | | | | | 65% | 796 | 855 |
| HNTCU51 | 916047 | 266 | HMMER | PFAM: Cell division | PF00735 | 152.9 | 314 | 700 |
| | | | 2.1.1 | protein | | | | |
| | | | blastx.2 | Septin 2-like cell division | sp\|AAF67469\|AAF67 | 90% | 128 | 790 |
| | | | | control protein. | 469 | | | |
| HNFDO52 | 916260 | 149 | HMMER | PFAM: Dual specificity | PF00782 | 92.1 | 2 | 358 |
| | | | 2.1.1 | phosphatase, catalytic | | | | |
| | | | | domain | | | | |
| | | | blastx.2 | dual specificity | pir\|A57126\|A57126 | 95% | 2 | 130 |
| | | | | phosphoprotein | | 100% | 257 | 358 |
| | | | | phosphatase (EC 3.1.3.-) 2- | | | | |
| | | | | human | | | | |
| HSHBW40 | 919040 | 267 | HMMER | PFAM: Tubulin | PF00091 | 22.7 | 3 | 110 |
| | | | 1.8 | | | | | |
| HHEJR23 | 1200643 | 151 | blastx.14 | CG10371 PROTEIN. | sp\|Q9VCI6\|Q9VCI6 | 43% | 174 | 449 |
| | | | | | | 48% | 453 | 620 |
| | | | | | | 57% | 105 | 167 |
| HHEJR23 | 919082 | 268 | HMMER | PFAM: Dual specificity | PF00782 | 52.2 | 426 | 253 |
| | | | 2.1.1 | phosphatase, catalytic | | | | |
| | | | | domain | | | | |
| | | | blastx.2 | CG10371 PROTEIN. | sp\|Q9VCI6\|Q9VCI6 | 42% | 774 | 259 |
| HCFMW71 | 920506 | 269 | HMMER | PFAM: Isopentenyl- | PF01772 | 55.5 | 198 | 362 |
| | | | 2.1.1 | diphosphate delta- | | | | |
| | | | | isomerase | | | | |
| | | | blastx.14 | homologue of yeast IPP | gi\|488750\|emb\|CAA3 | 42% | 198 | 407 |
| | | | | isomerase [Homo sapiens] | 4890.1\| | 62% | 95 | 199 |
| HBODA38 | 923456 | 153 | HMMER | PFAM: Fibronectin type | PF00041 | 31.21 | 418 | 648 |
| | | | 1.8 | III domain | | | | |
| | | | blastx.2 | Stretch response protein | sp\|CAC08495\|CAC0 | 90% | 853 | 1470 |
| | | | | 553 (Fragment). | 8495 | | | |
| HCYBK19 | 925494 | 154 | HMMER | PFAM: Fibronectin type | PF00041 | 26.97 | 368 | 658 |
| | | | 1.8 | III domain | | | | |
| | | | blastx.2 | hypothetical protein | pir\|T23642\|T23642 | 32% | 596 | 1336 |
| | | | | M01B2.10 - | | | | |
| | | | | Caenorhabditis elegans | | | | |
| HOFNH30 | 928365 | 155 | HMMER | PFAM: 7 transmembrane | PF00001 | 24.58 | 9 | 248 |
| | | | 1.8 | receptor (rhodopsin | | | | |
| | | | | family) | | | | |
| | | | blastx.2 | CALCIUM- | sp\|Q9UBY5\|Q9UBY5 | 75% | 18 | 263 |
| | | | | MOBILIZING | | 54% | 265 | 375 |
| | | | | LYSOPHOSPHATIDIC | | | | |
| | | | | ACID RECEPTOR 1 | | | | |
| HFXED03 | 928952 | 270 | HMMER | PFAM: Cell division | PF00735 | 284 | 1 | 570 |
| | | | 2.1.1 | protein | | | | |
| | | | blastx.2 | CDNA FLJ10849 FIS, | sp\|BAA91853\|BAA9 | 79% | 1 | 924 |
| | | | | CLONE NT2RP4001414, | 1853 | | | |
| | | | | HIGHLY SIMILAR TO 1 | | | | |
| HWMEV63 | 931154 | 157 | HMMER | PFAM: 7 transmembrane | PF00001 | 53.4 | 2 | 262 |
| | | | 2.1.1 | receptor (rhodopsin | | | | |
| | | | | family) | | | | |
| | | | blastx.2 | 7 transmembrane G- | sp\|AAG09275\|AAG0 | 75% | 2 | 391 |
| | | | | protein coupled receptor. | 9275 | | | |
| HWHGT26 | 1147962 | 158 | blastx.14 | (AF065391) ZIS1 [Homo | gi\|4191327\|gb\|AAD0 | 90% | 49 | 480 |
| | | | | sapiens] | 9746.1\| | 100% | 595 | 624 |
| HWHGT26 | 931213 | 271 | HMMER | PFAM: Zn-finger in Ran | PF00641 | 47.3 | 60 | 155 |
| | | | 2.1.1 | binding protein and | | | | |
| | | | | others. | | | | |
| | | | blastx.2 | ZIS1. | sp\|O95218\|O95218 | 90% | 36 | 467 |
| | | | | | | 100% | 823 | 963 |
| | | | | | | 100% | 1039 | 1122 |
| | | | | | | 100% | 582 | 611 |
| HBXBG65 | 932780 | 159 | HMMER | PFAM: Cytochrome P450 | PF00067 | 46.55 | 2 | 535 |
| | | | 1.8 | | | | | |
| | | | blastx.2 | CHOLESTEROL 24- | sp\|Q9Y6A2\|Q9Y6A2 | 98% | 2 | 535 |
| | | | | HYDROXYLASE. | | | | |
| HSDHB12 | 941973 | 160 | HMMER | PFAM: Fibronectin type | PF00041 | 110.6 | 156 | 416 |
| | | | 2.1.1 | III domain | | | | |
| | | | blastx.2 | 165 K protein, skeletal | pir\|S43529\|S43529 | 49% | 15 | 635 |
| | | | | muscle - human | | 29% | 3 | 536 |
| | | | | | | 32% | 33 | 443 |
| | | | | | | 29% | 36 | 446 |
| | | | | | | 40% | 156 | 446 |
| HSDHB12 | 969094 | 272 | HMMER | PFAM: Fibronectin type | PF00041 | 14.26 | 15 | 65 |
| | | | 1.8 | III domain | | | | |
| | | | blastx.14 | 165 kD protein [Homo | gi\|407097\|emb\|CAA4 | 48% | 15 | 278 |
| | | | | sapiens] | 8832.1\| | | | |
| HSDHB12 | 969097 | 273 | HMMER | PFAM: Fibronectin type | PF00041 | 110.6 | 691 | 431 |
| | | | 2.1.1 | III domain | | | | |
| | | | blastx.14 | 165 kD protein [Homo | gi\|407097\|emb\|CAA4 | 49% | 754 | 212 |
| | | | | sapiens] | 8832.1\| | 34% | 691 | 401 |
| | | | | | | 32% | 691 | 419 |
| | | | | | | 30% | 592 | 404 |
| | | | | | | 50% | 508 | 401 |
| | | | | | | 50% | 691 | 596 |
| | | | | | | 78% | 206 | 165 |
| | | | | | | 45% | 691 | 620 |
| | | | | | | 47% | 136 | 68 |
| | | | | | | 40% | 92 | 27 |
| | | | | | | 32% | 221 | 147 |
| HLWAR77 | 947484 | 161 | HMMER | PFAM: 7 transmembrane | PF00001 | 214.2 | 1287 | 553 |
| | | | 1.8 | receptor (rhodopsin | | | | |
| | | | | family) | | | | |
| | | | blastx.2 | G-protein coupled | sp\|AAF87078\|AAF87 | 100% | 1287 | 292 |
| | | | | receptor HLWAR77. | 078 | | | |
| HTTJQ27 | 949312 | 274 | HMMER | PFAM: TBC domain | PF00566 | 115.8 | 1054 | 659 |
| | | | 2.1.1 | | | | | |
| | | | blastx.2 | hypothetical protein | pir\|T48686\|T48686 | 82% | 1054 | 392 |
| | | | | DKFZp761D1823.1 - | | | | |
| | | | | human | | | | |
| HUJDA09 | 951526 | 275 | HMMER | PFAM: MAGE family | PF01454 | 92.9 | 273 | 605 |
| | | | 2.1.1 | | | | | |
| | | | blastx.14 | (AF124440) MAGE | gi\|4877759\|gb\|AAD3 | 91% | 228 | 599 |
| | | | | tumor antigen D1 [Homo | 1421.1\|AF124440_1 | 100% | 718 | 741 |
| | | | | sapiens] | | 66% | 690 | 725 |
| HEOST94 | 954582 | 164 | HMMER | PFAM: TBC domain | PF00566 | 25.9 | 36 | 203 |
| | | | 2.1.1 | | | | | |
| | | | blastx.2 | CG1702 PROTEIN. | sp\|Q9VRA4\|Q9VRA4 | 78% | 3 | 236 |
| | | | | | | 60% | 238 | 297 |
| HUVHQ75 | 955032 | 165 | HMMER | PFAM: Cell division | PF00735 | 110.8 | 254 | 544 |
| | | | 2.1.1 | protein | | | | |
| | | | blastx.2 | CDNA FLJ10849 FIS, | sp\|BAA91853\|BAA9 | 100% | 161 | 544 |
| | | | | CLONE NT2RP4001414, | 1853 | 88% | 580 | 633 |
| | | | | HIGHLY SIMILAR TO 1 | | 84% | 543 | 581 |
| HWAGC08 | 958139 | 276 | HMMER | PFAM: PWWP domain | PF00855 | 25.5 | 244 | 333 |
| | | | 2.1.1 | | | | | |
| HMWJI52 | 1202746 | 167 | blastx.14 | hypothetical protein | pir\|T08683\|T08683 | 72% | 129 | 584 |
| | | | | DKFZp564J2123.1 - | | 55% | 1 | 129 |
| | | | | human (fragment) | | | | |
| HMWJI52 | 961612 | 277 | HMMER | PFAM: TBC domain | PF00566 | 56.4 | 189 | 419 |
| | | | 2.1.1 | | | | | |
| | | | blastx.2 | hypothetical protein | pir\|T08683\|T08683 | 62% | 9 | 596 |
| | | | | DKFZp564J2123.1 - | | | | |
| | | | | human (fragment) | | | | |
| HAABH11 | 1199572 | 168 | blastx.14 | CG12746 PROTEIN. | sp\|Q9VND5\|Q9VND5 | 56% | 19 | 321 |
| HAABH11 | 965473 | 278 | HMMER | PFAM: PAP2 superfamily | PF01569 | 38.2 | 298 | 663 |
| | | | 2.1.1 | | | | | |
| | | | blastx.2 | CG12746 PROTEIN. | sp\|Q9VND5\|Q9VND5 | 46% | 46 | 666 |
| HAPAI15 | 965710 | 279 | HMMER | PFAM: Cell division | PF00735 | 94.2 | 4 | 180 |
| | | | 2.1.1 | protein | | | | |
| | | | blastx.2 | SEPTIN 6 | sp\|Q14141\|SEP6_IIU | 96% | 1 | 270 |
| | | | | (FRAGMENT). | MAN | | | |
| HAPAI15 | 965711 | 280 | HMMER | PFAM: Cell division | PF00735 | 388.2 | 424 | 1245 |
| | | | 2.1.1 | protein | | | | |
| | | | blastx.14 | (AB023622) Septin6 [Mus | gi\|5689158\|dbj\|BAA8 | 92% | 331 | 1419 |
| | | | | musculus] | 2838.1\| | 48% | 1486 | 1566 |
| HAPAI15 | 975377 | 281 | HMMER | PFAM: Cell division | PF00735 | 388.2 | 193 | 1014 |
| | | | 2.1.1 | protein | | | | |
| | | | blastx.14 | (AB023622) Septin6 [Mus | gi\|5689158\|dbj\|BAA8 | 95% | 91 | 1101 |
| | | | | musculus] | 2838.1\| | | | |
| HNGBQ66 | 966001 | 282 | HMMER | PFAM: Putative snoRNA | PF01798 | 327.1 | 1020 | 1466 |
| | | | 2.1.1 | binding domain | | | | |
| | | | blastx.2 | NUCLEOLAR PROTEIN | sp\|Q9Y2X3\|Q9Y2X3 | 93% | 264 | 1529 |
| | | | | NOP5/NOP58 | | | | |
| | | | | (NUCLEOLAR | | | | |
| | | | | PROTEIN 5). | | | | |
| HTXPY09 | 981988 | 171 | blastx.14 | (AL117554) hypothetical | gi\|5912090\|emb\|CAB | 76% | 327 | 533 |
| | | | | protein [Homo sapiens] | 55989.1\| | 97% | 103 | 237 |
| | | | | | | 66% | 554 | 634 |
| | | | | | | 55% | 535 | 588 |
| HTXPY09 | 966013 | 283 | HMMER | PFAM: Putative snoRNA | PF01798 | 39.1 | 465 | 551 |
| | | | 2.1.1 | binding domain | | | | |
| | | | blastx.2 | hypothetical protein | pir\|T17299\|T17299 | 72% | 327 | 587 |
| | | | | DKFZp564H2171.1 - | | 97% | 103 | 237 |
| | | | | human (fragment) | | 66% | 553 | 633 |
| HCFLJ17 | 954723 | 284 | HMMER | PFAM: Helix-loop-helix | PF00010 | 8.34 | 151 | 207 |
| | | | 1.8 | DNA-binding domain | | | | |
| | | | blastx.2 | NY-REN-6 ANTIGEN | sp\|Q9Y5A8\|Q9Y5A8 | 60% | 199 | 411 |
| | | | | (FRAGMENT). | | 94% | 1 | 105 |
| HCFLJ17 | 966294 | 285 | HMMER | PFAM: FF domain | PF01846 | 63.4 | 174 | 341 |
| | | | 2.1.1 | | | | | |
| | | | blastx.2 | (AF155096) NY-REN-6 | gb\|AAD42862.1\|AF1 | 99% | 3 | 1193 |
| | | | | antigen [Homo sapiens] | 55096_1 | 69% | 1178 | 1216 |
| HGOCA12 | 968763 | 286 | HMMER | PFAM: Dual specificity | PF00782 | 28.6 | 112 | 360 |
| | | | 2.1.1 | phosphatase, catalytic | | | | |
| | | | | domain | | | | |
| | | | blastx.2 | PROTEIN | sp\|Q9UII6\|Q9UII6 | 40% | 25 | 360 |
| | | | | PHOSPHATASE. | | | | |
| HGOCA12 | 971583 | 287 | HMMER | PFAM: Dual specificity | PF00782 | 60.1 | 467 | 318 |
| | | | 2.1.1 | phosphatase, catalytic | | | | |
| | | | | domain | | | | |
| | | | blastx.14 | phosphatase | gi\|181840\|gb\|AAA35 | 48% | 515 | 318 |
| | | | | tyrosine/serine [Homo | 777.1\| | | | |
| | | | | sapiens] | | | | |
| HCE5E94 | 1070802 | 174 | blastx.2 | (AF087661) NADH- | gb\|AAD09755.1\| | 100% | 513 | 1079 |
| | | | | ubiquinone | | 99% | 14 | 514 |
| | | | | oxidoreductase 42 kDa | | | | |
| | | | | subunit [Homo sapiens] | | | | |
| HCE5E94 | 971074 | 290 | HMMER | PFAM: Deoxynucleoside | PF01712 | 62.3 | 423 | 761 |
| | | | 2.1.1 | kinase | | | | |
| | | | blastx.14 | (AF087661) NADH- | gi\|4191348\|gb\|AAAD0 | 94% | 33 | 1097 |
| | | | | ubiquinone | 9755.1\| | | | |
| | | | | oxidoreductase 42 kDa | | | | |
| | | | | subunit [Homo sapiens] | | | | |
| HNTAV78 | 971315 | 175 | HMMER | PFAM: 7 transmembrane | PF00001 | 23.92 | 3 | 143 |
| | | | 1.8 | receptor (rhodopsin | | | | |
| | | | | family) | | | | |
| | | | blastx. 2 | Cysteinyl leukotriene | sp\|BAB03601\|BAB0 | 100% | 3 | 266 |
| | | | | CysLT2 receptor. | 3601 | | | |
| HHEEL28 | 973096 | 291 | HMMER | PFAM: GTPase-activator | PF00616 | 47.4 | 148 | 372 |
| | | | 2.1.1 | protein for Ras-like | | | | |
| | | | | GTPase | | | | |
| | | | blastx.14 | (AF047711) nGAP | gi\|4105589\|gb\|AAD0 | 51% | 4 | 375 |
| | | | | [Homo sapiens] | 4814.1\| | | | |
| HE8UT58 | 973153 | 177 | HMMER | PFAM: Fibronectin type | PF00041 | 15.44 | 72 | 191 |
| | | | 1.8 | III domain | | | | |
| | | | blastx.2 | ASTROTACTIN2. | sp\|Q9QY74\|Q9QY74 | 96% | 3 | 662 |
| HIBCN93 | 973679 | 292 | HMMER | PFAM: MAGE family | PF01454 | 28.9 | 552 | 644 |
| | | | 2.1.1 | | | | | |
| | | | blastx.2 | (AF143235) apoptosis | gb\|AAD31314.3\|AF1 | 99% | 282 | 938 |
| | | | | related protein APR-1 | 43235_1 | | | |
| | | | | [Homo sapiens] | | | | |
| HDPBI30 | 974711 | 179 | HMMER | PFAM: 7 transmembrane | PF00001 | 171.31 | 386 | 1096 |
| | | | 1.8 | receptor (rhodopsin | | | | |
| | | | | family) | | | | |
| | | | blastx.2 | G PROTEIN-COUPLED | sp\|Q9UNW8\|Q9UN | 93% | 206 | 1312 |
| | | | | RECEPTOR. | W8 | | | |
| HLTGA03 | 974851 | 180 | HMMER | PFAM: ICE-like protease | PF00655 | 29.5 | 703 | 605 |
| | | | 2.1.1 | (caspase) p10 domain | | | | |
| | | | blastx.2 | interleukin-1 beta | pir\|D56084\|D56084\| | 75% | 703 | 599 |
| | | | | converting enzyme | | | | |
| | | | | epilson isozyme - human | | | | |
| HLTGA03 | 974852 | 293 | HMMER | PFAM: ICE-like protease | PF00655 | 27.5 | 224 | 286 |
| | | | 2.1.1 | (caspase) p10 domain | | | | |
| HFXJI27 | 975381 | 294 | HMMER | PFAM: Fibronectin type | PF00041 | 22 | 21 | 110 |
| | | | 2.1.1 | III domain | | | | |

[0047] Table 2 further characterizes certain encoded polypeptides of the invention, by providing the results of comparisons to protein and protein family databases. The first column provides a unique clone identifier, “Clone ID NO:”, corresponding to a cDNA clone disclosed in Table 1A. The second column provides the unique contig identifier, “Contig ID:” which allows correlation with the information in Table 1A. The third column provides the sequence identifier, “SEQ ID NO:”, for the contig polynucleotide sequences. The fourth column provides the analysis method by which the homology/identity disclosed in the Table was determined. The fifth column provides a description of the PFAM/NR hit identified by each analysis. Column six provides the accession number of the PFAM/NR hit disclosed in the fifth column. Column seven, score/percent identity, provides a quality score or the percent identity, of the hit disclosed in column five. Comparisons were made between polypeptides encoded by polynucleotides of the invention and a non-redundant protein database (herein referred to as “NR”), or a database of protein families (herein referred to as “PFAM”), as described below.

[0048] The NR database, which comprises the NBRF PIR database, the NCBI GenPept database, and the SIB SwissProt and TrEMBL databases, was made non-redundant using the computer program nrdb2 (Warren Gish, Washington University in Saint Louis). Each of the polynucleotides shown in Table 1A, column 3 (e.g., SEQ ID NO:X or the ‘Query’ sequence) was used to search against the NR database. The computer program BLASTX was used to compare a 6-frame translation of the Query sequence to the NR database (for information about the BLASTX algorithm please see Altshul et al., J. Mol. Biol. 215:403-410 (1990); and Gish and States, Nat. Genet. 3:266-272 (1993). A description of the sequence that is most similar to the Query sequence (the highest scoring ‘Subject’) is shown in column five of Table 2 and the database accession number for that sequence is provided in column six. The highest scoring ‘Subject’ is reported in Table 2 if (a) the estimated probability that the match occurred by chance alone is less than 1.0e-07, and (b) the match was not to a known repetitive element. BLASTX returns alignments of short polypeptide segments of the Query and Subject sequences which share a high degree of similarity; these segments are known as High-Scoring Segment Pairs or HSPs. Table 2 reports the degree of similarity between the Query and the Subject for each HSP as a percent identity in Column 7. The percent identity is determined by dividing the number of exact matches between the two aligned sequences in the HSP, dividing by the number of Query amino acids in the HSP and multiplying by 100. The polynucleotides of SEQ ID NO:X which encode the polypeptide sequence that generates an HSP are delineated by columns 8 and 9 of Table 2.

[0049] The PFAM database, PFAM version 2.1, (Sonnhammer et al., Nucl. Acids Res., 26:320-322, 1998)) consists of a series of multiple sequence alignments; one alignment for each protein family. Each multiple sequence alignment is converted into a probability model called a Hidden Markov Model, or HMM, that represents the position-specific variation among the sequences that make up the multiple sequence alignment (see, e.g., Durbin et al., Biological sequence analysis: probabilistic models of proteins and nucleic acids, Cambridge University Press, 1998 for the theory of HMMs). The program HMMER version 1.8 (Sean Eddy, Washington University in Saint Louis) was used to compare the predicted protein sequence for each Query sequence (SEQ ID NO:Y in Table 1A) to each of the HMMs derived from PFAM version 2.1. A HMM derived from PFAM version 2.1 was said to be a significant match to a polypeptide of the invention if the score returned by HMMER 1.8 was greater than 0.8 times the HMMER 1.8 score obtained with the most distantly related known member of that protein family. The description of the PFAM family which shares a significant match with a polypeptide of the invention is listed in column 5 of Table 2, and the database accession number of the PFAM hit is provided in column 6. Column 7 provides the score returned by HMMER version 1.8 for the alignment. Columns 8 and 9 delineate the polynucleotides of SEQ ID NO:X which encode the polypeptide sequence which show a significant match to a PFAM protein family.

[0050] As mentioned, columns 8 and 9 in Table 2, “NT From” and “NT To”, delineate the polynucleotides of “SEQ ID NO:X” that encode a polypeptide having a significant match to the PFAM/NR database as disclosed in the fifth column. In one embodiment, the invention provides a protein comprising, or alternatively consisting of, a polypeptide encoded by the polynucleotides of SEQ ID NO:X delineated in columns 8 and 9 of Table 2. Also provided are polynucleotides encoding such proteins, and the complementary strand thereto.

[0051] The nucleotide sequence SEQ ID NO:X and the translated SEQ ID NO:Y are sufficiently accurate and otherwise suitable for a variety of uses well known in the art and described further below. For instance, the nucleotide sequences of SEQ ID NO:X are useful for designing nucleic acid hybridization probes that will detect nucleic acid sequences contained in SEQ ID NO:X or the cDNA contained in Clone ID NO:Z. These probes will also hybridize to nucleic acid molecules in biological samples, thereby enabling immediate applications in chromosome mapping, linkage analysis, tissue identification and/or typing, and a variety of forensic and diagnostic methods of the invention. Similarly, polypeptides identified from SEQ ID NO:Y may be used to generate antibodies which bind specifically to these polypeptides, or fragments thereof, and/or to the polypeptides encoded by the cDNA clones identified in, for example, Table 1A.

[0052] Nevertheless, DNA sequences generated by sequencing reactions can contain sequencing errors. The errors exist as misidentified nucleotides, or as insertions or deletions of nucleotides in the generated DNA sequence. The erroneously inserted or deleted nucleotides cause frame shifts in the reading frames of the predicted amino acid sequence. In these cases, the predicted amino acid sequence diverges from the actual amino acid sequence, even though the generated DNA sequence may be greater than 99.9% identical to the actual DNA sequence (for example, one base insertion or deletion in an open reading frame of over 1000 bases).

[0053] Accordingly, for those applications requiring precision in the nucleotide sequence or the amino acid sequence, the present invention provides not only the generated nucleotide sequence identified as SEQ ID NO:X, and a predicted translated amino acid sequence identified as SEQ ID NO:Y, but also a sample of plasmid DNA containing cDNA Clone ID NO:Z (deposited with the ATCC on Oct. 5, 2000, and receiving ATCC designation numbers PTA 2574 and PTA 2575; deposited with the ATCC on Jan. 5, 2001, and having depositor reference numbers TS-1, TS-2, AC-1, and AC-2; and/or as set forth, for example, in Table 1A, 6 and 7). The nucleotide sequence of each deposited clone can readily be determined by sequencing the deposited clone in accordance with known methods. Further, techniques known in the art can be used to verify the nucleotide sequences of SEQ ID NO:X.

[0054] The predicted amino acid sequence can then be verified from such deposits. Moreover, the amino acid sequence of the protein encoded by a particular clone can also be directly determined by peptide sequencing or by expressing the protein in a suitable host cell containing the deposited human cDNA, collecting the protein, and determining its sequence.

### RACE Protocol For Recovery of Full-Length Genes

[0055] Partial cDNA clones can be made full-length by utilizing the rapid amplification of cDNA ends (RACE) procedure described in Frohman, M. A., et al., Proc. Nat'l. Acad. Sci. USA, 85:8998-9002 (1988). A cDNA clone missing either the 5′ or 3′ end can be reconstructed to include the absent base pairs extending to the translational start or stop codon, respectively. In some cases, cDNAs are missing the start codon of translation, therefor. The following briefly describes a modification of this original 5′ RACE procedure. Poly A+ or total RNA is reverse transcribed with Superscript II (Gibco/BRL) and an antisense or complementary primer specific to the cDNA sequence. The primer is removed from the reaction with a Microcon Concentrator (Amicon). The first-strand cDNA is then tailed with dATP and terminal deoxynucleotide transferase (Gibco/BRL). Thus, an anchor sequence is produced which is needed for PCR amplification. The second strand is synthesized from the dA-tail in PCR buffer, Taq DNA polymerase (Perkin-Elmer Cetus), an oligo-dT primer containing three adjacent restriction sites (XhoI, SalI and ClaI) at the 5′ end and a primer containing just these restriction sites. This double-stranded cDNA is PCR amplified for 40 cycles with the same primers as well as a nested cDNA-specific antisense primer. The PCR products are size-separated on an ethidium bromide-agarose gel and the region of gel containing cDNA products the predicted size of missing protein-coding DNA is removed. cDNA is purified from the agarose with the Magic PCR Prep kit (Promega), restriction digested with XhoI or SalI, and ligated to a plasmid such as pBluescript SKII (Stratagene) at XhoI and EcoRV sites. This DNA is transformed into bacteria and the plasmid clones sequenced to identify the correct protein-coding inserts. Correct 5′ ends are confirmed by comparing this sequence with the putatively identified homologue and overlap with the partial cDNA clone. Similar methods known in the art and/or commercial kits are used to amplify and recover 3′ ends.

[0056] Several quality-controlled kits are commercially available for purchase. Similar reagents and methods to those above are supplied in kit form from Gibco/BRL for both 5′ and 3′ RACE for recovery of full length genes. A second kit is available from Clontech which is a modification of a related technique, SLIC (single-stranded ligation to single-stranded cDNA), developed by Dumas et al., Nucleic Acids Res., 19:5227-32 (1991). The major differences in procedure are that the RNA is alkaline hydrolyzed after reverse transcription and RNA ligase is used to join a restriction site-containing anchor primer to the first-strand cDNA. This obviates the necessity for the dA-tailing reaction which results in a polyT stretch that is difficult to sequence past.

[0057] An alternative to generating 5′ or 3′ cDNA from RNA is to use cDNA library double-stranded DNA. An asymmetric PCR-amplified antisense cDNA strand is synthesized with an antisense cDNA-specific primer and a plasmid-anchored primer. These primers are removed and a symmetric PCR reaction is performed with a nested cDNA-specific antisense primer and the plasmid-anchored primer.

### RNA Ligase Protocol For Generating The 5′ or 3′ End Sequences To Obtain Full Length Genes

[0058] Once a gene of interest is identified, several methods are available for the identification of the 5′ or 3′ portions of the gene which may not be present in the original cDNA plasmid. These methods include, but are not limited to, filter probing, clone enrichment using specific probes and protocols similar and identical to 5′ and 3′ RACE. While the full length gene may be present in the library and can be identified by probing, a useful method for generating the 5′ or 3′ end is to use the existing sequence information from the original cDNA to generate the missing information. A method similar to 5′ RACE is available for generating the missing 5′ end of a desired full-length gene. (This method was published by Fromont-Racine et al., Nucleic Acids Res., 21(7):1683-1684 (1993)). Briefly, a specific RNA oligonucleotide is ligated to the 5′ ends of a population of RNA presumably containing full-length gene RNA transcript and a primer set containing a primer specific to the ligated RNA oligonucleotide and a primer specific to a known sequence of the gene of interest, is used to PCR amplify the 5′ portion of the desired full length gene which may then be sequenced and used to generate the full length gene. This method starts with total RNA isolated from the desired source, poly A RNA may be used but is not a prerequisite for this procedure. The RNA preparation may then be treated with phosphatase if necessary to eliminate 5′ phosphate groups on degraded or damaged RNA which may interfere with the later RNA ligase step. The phosphatase if used is then inactivated and the RNA is treated with tobacco acid pyrophosphatase in order to remove the cap structure present at the 5′ ends of messenger RNAs. This reaction leaves a 5′ phosphate group at the 5′ end of the cap cleaved RNA which can then be ligated to an RNA oligonucleotide using T4 RNA ligase. This modified RNA preparation can then be used as a template for first strand cDNA synthesis using a gene specific oligonucleotide. The first strand synthesis reaction can then be used as a template for PCR amplification of the desired 5′ end using a primer specific to the ligated RNA oligonucleotide and a primer specific to the known sequence of the gene of interest. The resultant product is then sequenced and analyzed to confirm that the 5′ end sequence belongs to the relevant gene.

[0059] The present invention also relates to vectors or plasmids which include such DNA sequences, as well as the use of the DNA sequences. The material deposited with the ATCC (deposited with the ATCC on Oct. 5, 2000, and receiving ATCC designation numbers PTA 2574 and PTA 2575; deposited with the ATCC on Jan. 5, 2001, and receiving ATCC designation numbers TS-1, TS-2, AC-1, and AC-2; and/or as set forth, for example, in Table 1A, Table 6, or Table 7) is a mixture of cDNA clones derived from a variety of human tissue and cloned in either a plasmid vector or a phage vector, as described, for example, in Table 7. These deposits are referred to as “the deposits” herein. The tissues from which some of the clones were derived are listed in Table 7, and the vector in which the corresponding cDNA is contained is also indicated in Table 7. The deposited material includes cDNA clones corresponding to SEQ ID NO:X described, for example, in Table 1A (Clone ID NO:Z). A clone which is isolatable from the ATCC Deposits by use of a sequence listed as SEQ ID NO:X, may include the entire coding region of a human gene or in other cases such clone may include a substantial portion of the coding region of a human gene. Furthermore, although the sequence listing may in some instances list only a portion of the DNA sequence in a clone included in the ATCC Deposits, it is well within the ability of one skilled in the art to sequence the DNA included in a clone contained in the ATCC Deposits by use of a sequence (or portion thereof) described in, for example Tables 1Aor 2 by procedures hereinafter further described, and others apparent to those skilled in the art.

[0060] Also provided in Table 7 is the name of the vector which contains the cDNA clone. Each vector is routinely used in the art. The following additional information is provided for convenience.

[0061] Vectors Lambda Zap (U.S. Pat. Nos. 5,128,256 and 5,286,636), Uni-Zap XR (U.S. Pat. Nos. 5,128,256 and 5,286,636), Zap Express (U.S. Pat. Nos. 5,128,256 and 5,286,636), pBluescript (pBS) (Short, J. M. et al., Nucleic Acids Res. 16:7583-7600 (1988); Alting-Mees, M. A. and Short, J. M., Nucleic Acids Res. 17:9494 (1989)) and pBK (Alting-Mees, M. A. et al., Strategies 5:58-61 (1992)) are commercially available from Stratagene Cloning Systems, Inc., 11011 N. Torrey Pines Road, La Jolla, Calif., 92037. pBS contains an ampicillin resistance gene and pBK contains a neomycin resistance gene. Phagemid pBS may be excised from the Lambda Zap and Uni-Zap XR vectors, and phagemid pBK may be excised from the Zap Express vector. Both phagemids may be transformed into E. coli strain XL-1 Blue, also available from Stratagene.

[0062] Vectors pSport1, pCMVSport 1.0, pCMVSport 2.0 and pCMVSport 3.0, were obtained from Life Technologies, Inc., P. O. Box 6009, Gaithersburg, Md. 20897. All Sport vectors contain an ampicillin resistance gene and may be transformed into E. coli strain DH10B, also available from Life Technologies. See, for instance, Gruber, C. E., et al., Focus 15:59- (1993). Vector lafmid BA (Bento Soares, Columbia University, New York, N.Y.) contains an ampicillin resistance gene and can be transformed into E. coli strain XL-1 Blue. Vector pCR®2.1, which is available from Invitrogen, 1600 Faraday Avenue, Carlsbad, Calif. 92008, contains an ampicillin resistance gene and may be transformed into E. coli strain DH10B, available from Life Technologies. See, for instance, Clark, J. M., Nuc. Acids Res. 16:9677-9686 (1988) and Mead, D. et al., Bio/Technology 9: (1991).

[0063] The present invention also relates to the genes corresponding to SEQ ID NO:X, SEQ ID NO:Y, and/or the deposited clone (Clone ID NO:Z). The corresponding gene can be isolated in accordance with known methods using the sequence information disclosed herein. Such methods include preparing probes or primers from the disclosed sequence and identifying or amplifying the corresponding gene from appropriate sources of genomic material.

[0064] Also provided in the present invention are allelic variants, orthologs, and/or species homologs. Procedures known in the art can be used to obtain full-length genes, allelic variants, splice variants, full-length coding portions, orthologs, and/or species homologs of genes corresponding to SEQ ID NO:X or the complement thereof, polypeptides encoded by genes corresponding to SEQ ID NO:X or the complement thereof, and/or the cDNA contained in Clone ID NO:Z, using information from the sequences disclosed herein or the clones deposited with the ATCC. For example, allelic variants and/or species homologs may be isolated and identified by making suitable probes or primers from the sequences provided herein and screening a suitable nucleic acid source for allelic variants and/or the desired homologue.

[0065] The polypeptides of the invention can be prepared in any suitable manner. Such polypeptides include isolated naturally occurring polypeptides, recombinantly produced polypeptides, synthetically produced polypeptides, or polypeptides produced by a combination of these methods. Means for preparing such polypeptides are well understood in the art.

[0066] The polypeptides may be in the form of the secreted protein, including the mature form, or may be a part of a larger protein, such as a fusion protein (see below). It is often advantageous to include an additional amino acid sequence which contains secretory or leader sequences, pro-sequences, sequences which aid in purification, such as multiple histidine residues, or an additional sequence for stability during recombinant production.

[0067] The polypeptides of the present invention are preferably provided in an isolated form, and preferably are substantially purified. A recombinantly produced version of a polypeptide, including the secreted polypeptide, can be substantially purified using techniques described herein or otherwise known in the art, such as, for example, by the one-step method described in Smith and Johnson, Gene 67:31-40 (1988). Polypeptides of the invention also can be purified from natural, synthetic or recombinant sources using techniques described herein or otherwise known in the art, such as, for example, antibodies of the invention raised against the polypeptides of the present invention in methods which are well known in the art.

[0068] The present invention provides a polynucleotide comprising, or alternatively consisting of, the nucleic acid sequence of SEQ ID NO:X, and/or the cDNA sequence contained in Clone ID NO:Z. The present invention also provides a polypeptide comprising, or alternatively, consisting of, the polypeptide sequence of SEQ ID NO:Y, a polypeptide encoded by SEQ ID NO:X or a complement thereof, a polypeptide encoded by the cDNA contained in Clone ID NO:Z, and/or the polypeptide sequence encoded by a nucleotide sequence in SEQ ID NO:B as defined in column 6 of Table 1B. Polynucleotides encoding a polypeptide comprising, or alternatively consisting of the polypeptide sequence of SEQ ID NO:Y, a polypeptide encoded by SEQ ID NO:X, a polypeptide encoded by the cDNA contained in Clone ID NO:Z, and/or a polypeptide sequence encoded by a nucleotide sequence in SEQ ID NO:B as defined in column 6 of Table 1B are also encompassed by the invention. The present invention further encompasses a polynucleotide comprising, or alternatively consisting of, the complement of the nucleic acid sequence of SEQ ID NO:X, a nucleic acid sequence encoding a polypeptide encoded by the complement of the nucleic acid sequence of SEQ ID NO:X, and/or the cDNA contained in Clone ID NO:Z.

[0069] Moreover, representative examples of polynucleotides of the invention comprise, or alternatively consist of, one, two, three, four, five, six, seven, eight, nine, ten, or more of the sequences delineated in Table 1B column 6, or any combination thereof. Additional, representative examples of polynucleotides of the invention comprise, or alternatively consist of, one, two, three, four, five, six, seven, eight, nine, ten, or more of the complementary strand(s) of the sequences delineated in Table 1B column 6, or any combination thereof. In further embodiments, the above-described polynucleotides of the invention comprise, or alternatively consist of, sequences delineated in Table 1B, column 6, and have a nucleic acid sequence which is different from that of the BAC fragrnent having the sequence disclosed in SEQ ID NO:B (see Table 1B, column 5). In additional embodinients, the above-described polynucleotides of the invention comprise, or alternatively consist of, sequences delineated in Table 1B, column 6, and have a nucleic acid sequence which is different from that published for the BAC clone identified as BAC ID NO:A (see Table 1B, column 4). In additional embodiments, the above-described polynucleotides of the invention comprise, or alternatively consist of, sequences delineated in Table 1B, column 6, and have a nucleic acid sequence which is different from that contained in the BAC clone identified as BAC ID NO:A (see Table 1B, column 4). Polypeptides encoded by these polynucleotides, other polynucleotides that encode these polypeptides, and antibodies that bind these polypeptides are also encompassed by the invention. Additionally, fragments and variants of the above-described polynucleotides and polypeptides are also encompassed by the invention.

[0070] Further, representative examples of polynucleotides of the invention comprise, or alternatively consist of, one, two, three, four, five, six, seven, eight, nine, ten, or more of the sequences delineated in column 6 of Table 1B which correspond to the same Clone ID NO:Z (see Table 1B, column 1), or any combination thereof. Additional, representative examples of polynucleotides of the invention comprise, or alternatively consist of, one, two, three, four, five, six, seven, eight, nine, ten, or more of the complementary strand(s) of the sequences delineated in column 6 of Table 1B which correspond to the same Clone ID NO:Z (see Table 1B, column 1), or any combination thereof. In further embodiments, the above-described polynucleotides of the invention comprise, or alternatively consist of, sequences delineated in column 6 of Table 1B which correspond to the same Clone ID NO:Z (see Table 1B, column 1) and have a nucleic acid sequence which is different from that of the BAC fragment having the sequence disclosed in SEQ ID NO:B (see Table 1B, column 5). In additional embodiments, the above-described polynucleotides of the invention comprise, or alternatively consist of, sequences delineated in column 6 of Table 1B which correspond to the same Clone ID NO:Z (see Table 1B, column 1) and have a nucleic acid sequence which is different from that published for the BAC clone identified as BAC ID NO:A (see Table 1B, column 4). In additional embodiments, the above-described polynucleotides of the invention comprise, or alternatively consist of, sequences delineated in column 6 of Table 1B which correspond to the same Clone ID NO:Z (see Table 1B, column 1) and have a nucleic acid sequence which is different from that contained in the BAC clone identified as BAC ID NO:A (see Table 1B, column 4). Polypeptides encoded by these polynucleotides, other polynucleotides that encode these polypeptides, and antibodies that bind these polypeptides are also encompassed by the invention. Additionally, fragments and variants of the above-described polynucleotides and polypeptides are also encompassed by the invention.

[0071] Further, representative examples of polynucleotides of the invention comprise, or alternatively consist of, one, two, three, four, five, six, seven, eight, nine, ten, or more of the sequences delineated in column 6 of Table 1B which correspond to the same contig sequence identifer SEQ ID NO:X (see Table 1B, column 2), or any combination thereof. Additional, representative examples of polynucleotides of the invention comprise, or alternatively consist of, one, two, three, four, five, six, seven, eight, nine, ten, or more of the complementary strand(s) of the sequences delineated in column 6 of Table 1B which correspond to the same contig sequence identifer SEQ ID NO:X (see Table 1B, column 2), or any combination thereof. In further embodiments, the above-described polynucleotides of the invention comprise, or alternatively consist of, sequences delineated in column 6 of Table 1B which correspond to the same contig sequence identifer SEQ ID NO:X (see Table 1B, column 2) and have a nucleic acid sequence which is different from that of the BAC fragment having the sequence disclosed in SEQ ID NO:B (see Table 1B, column 5). In additional embodiments, the above-described polynucleotides of the invention comprise, or alternatively consist of, sequences delineated in column 6 of Table 1B which correspond to the same contig sequence identifer SEQ ID NO:X (see Table 1B, column 2) and have a nucleic acid sequence which is different from that published for the BAC clone identified as BAC ID NO:A (see Table 1B, column 4). In additional embodiments, the above-described polynucleotides of the invention comprise, or alternatively consist of, sequences delineated in column 6 of Table 1B which correspond to the same contig sequence identifer SEQ ID NO:X (see Table 1B, column 2) and have a nucleic acid sequence which is different from that contained in the BAC clone identified as BAC ID NO:A (See Table 1B, column 4). Polypeptides encoded by these polynucleotides, other polynucleotides that encode these polypeptides, and antibodies that bind these polypeptides are also encompassed by the invention. Additionally, fragments and variants of the above-described polynucleotides and polypeptides are also encompassed by the invention.

[0072] Moreover, representative examples of polynucleotides of the invention comprise, or alternatively consist of, one, two, three, four, five, six, seven, eight, nine, ten, or more of the sequences delineated in the same row of Table 1B column 6, or any combination thereof. Additional, representative examples of polynucleotides of the invention comprise, or alternatively consist of, one, two, three, four, five, six, seven, eight, nine, ten, or more of the complementary strand(s) of the sequences delineated in the same row of Table 1B column 6, or any combination thereof. In preferred embodiments, the polynucleotides of the invention comprise, or alternatively consist of, one, two, three, four, five, six, seven, eight, nine, ten, or more of the complementary strand(s) of the sequences delineated in the same row of Table 1B column 6, wherein sequentially delineated sequences in the table (i.e. corresponding to those exons located closest to each other) are directly contiguous in a 5′ to 3′ orientation. In further embodiments, above-described polynucleotides of the invention comprise, or alternatively consist of, sequences delineated in the same row of Table 1B, column 6, and have a nucleic acid sequence which is different from that of the BAC fragment having the sequence disclosed in SEQ ID NO:B (see Table 1B, column 5). In additional embodiments, the above-described polynucleotides of the invention comprise, or alternatively consist of, sequences delineated in the same row of Table 1B, column 6, and have a nucleic acid sequence which is different from that published for the BAC clone identified as BAC ID NO:A (see Table 1B, column 4). In additional embodiments, the above-described polynucleotides of the invention comprise, or alternatively consist of, sequences delineated in the same row of Table 1B, column 6, and have a nucleic acid sequence which is different from that contained in the BAC clone identified as BAC ID NO:A (see Table 1B, column 4). Polypeptides encoded by these polynucleotides, other polynucleotides that encode these polypeptides, and antibodies that bind these polypeptides are also encompassed by the invention.

[0073] In additional specific embodiments, polynucleotides of the invention comprise, or alternatively consist of, one, two, three, four, five, six, seven, eight, nine, ten, or more of the sequences delineated in column 6 of Table 1B, and the polynucleotide sequence of SEQ ID NO:X (e.g., as defined in Table 1B, column 2) or fragments or variants thereof. Polypeptides encoded by these polynucleotides, other polynucleotides that encode these polypeptides, and antibodies that bind these polypeptides are also encompassed by the invention.

[0074] In additional specific embodiments, polynucleotides of the invention comprise, or alternatively consist of, one, two, three, four, five, six, seven, eight, nine, ten, or more of the sequences delineated in column 6 of Table 1B which correspond to the same Clone ID NO:Z (see Table 1B, column 1), and the polynucleotide sequence of SEQ ID NO:X (e.g., as defined in Table 1A or 1B) or fragments or variants thereof. In preferred embodiments, the delineated sequence(s) and polynucleotide sequence of SEQ ID NO:X correspond to the same Clone ID NO:Z. Polypeptides encoded by these polynucleotides, other polynucleotides that encode these polypeptides, and antibodies that bind these polypeptides are also encompassed by the invention.

[0075] In further specific embodiments, polynucleotides of the invention comprise, or alternatively consist of, one, two, three, four, five, six, seven, eight, nine, ten, or more of the sequences delineated in the same row of column 6 of Table 1B, and the polynucleotide sequence of SEQ ID NO:X (e.g., as defined in Table 1A or 1B) or fragments or variants thereof. In preferred embodiments, the delineated sequence(s) and polynucleotide sequence of SEQ ID NO:X correspond to the same row of column 6 of Table 1B. Polypeptides encoded by these polynucleotides, other polynucleotides that encode these polypeptides, and antibodies that bind these polypeptides are also encompassed by the invention.

[0076] In additional specific embodiments, polynucleotides of the invention comprise, or alternatively consist of a polynucleotide sequence in which the 3′ 10 polynucleotides of one of the sequences delineated in column 6 of Table 1B and the 5′ 10 polynucleotides of the sequence of SEQ ID NO:X are directly contiguous. Nucleic acids which hybridize to the complement of these 20 contiguous polynucleotides under stringent hybridization conditions or alternatively, under lower stringency conditions, are also encompassed by the invention. Polypeptides encoded by these polynucleotides and/or nucleic acids, other polynucleotides and/or nucleic acids that encode these polypeptides, and antibodies that bind these polypeptides are also encompassed by the invention. Additionally, fragments and variants of the above-described polynucleotides, nucleic acids, and polypeptides are also encompassed by the invention.

[0077] In additional specific embodiments, polynucleotides of the invention comprise, or alternatively consist of, a polynucleotide sequence in which the 3′ 10 polynucleotides of one of the sequences delineated in column 6 of Table 1B and the 5′ 10 polynucleotides of a fragment or variant of the sequence of SEQ ID NO:X are directly contiguous Nucleic acids which hybridize to the complement of these 20 contiguous polynucleotides under stringent hybridization conditions or alternatively, under lower stringency conditions, are also encompassed by the invention. Polypeptides encoded by these polynucleotides and/or nucleic acids, other polynucleotides and/or nucleic acids encoding these polypeptides, and antibodies that bind these polypeptides are also encompassed by the invention. Additionally, fragments and variants of the above-described polynucleotides, nucleic acids, and polypeptides are also encompassed by the invention.

[0078] In specific embodiments, polynucleotides of the invention comprise, or alternatively consist of, a polynucleotide sequence in which the 3′ 10 polynucleotides of the sequence of SEQ ID NO:X and the 5′ 10 polynucleotides of the sequence of one of the sequences delineated in column 6 of Table 1B are directly contiguous. Nucleic acids which hybridize to the complement of these 20 contiguous polynucleotides under stringent hybridization conditions or alternatively, under lower stringency conditions, are also encompassed by the invention. Polypeptides encoded by these polynucleotides and/or nucleic acids, other polynucleotides and/or nucleic acids encoding these polypeptides, and antibodies that bind these polypeptides are also encompassed by the invention. Additionally, fragments and variants of the above-described polynucleotides, nucleic acids, and polypeptides are also encompassed by the invention.

[0079] In specific embodiments, polynucleotides of the invention comprise, or alternatively consist of, a polynucleotide sequence in which the 3′ 10 polynucleotides of a fragment or variant of the sequence of SEQ ID NO:X and the 5′ 10 polynucleotides of the sequence of one of the sequences delineated in column 6 of Table 1B are directly contiguous. Nucleic acids which hybridize to the complement of these 20 contiguous polynucleotides under stringent hybridization conditions or alternatively, under lower stringency conditions, are also encompassed by the invention. Polypeptides encoded by these polynucleotides and/or nucleic acids, other polynucleotides and/or nucleic acids encoding these polypeptides, and antibodies that bind these polypeptides are also encompassed by the invention. Additionally, fragments and variants of the above-described polynucleotides, nucleic acids, and polypeptides, are also encompassed by the invention.

[0080] In further specific embodiments, polynucleotides of the invention comprise, or alternatively consist of, a polynucleotide sequence in which the 3′ 10 polynucleotides of one of the sequences delineated in column 6 of Table 1B and the 5′ 10 polynucleotides of another sequence in column 6 are directly contiguous. Nucleic acids which hybridize to the complement of these 20 contiguous polynucleotides under stringent hybridization conditions or alternatively, under lower stringency conditions, are also encompassed by the invention. Polypeptides encoded by these polynucleotides and/or nucleic acids, other polynucleotides and/or nucleic acids encoding these polypeptides, and antibodies that bind these polypeptides are also encompassed by the invention. Additionally, fragments and variants of the above-described polynucleotides, nucleic acids, and polypeptides are also encompassed by the invention.

[0081] In specific embodiments, polynucleotides of the invention comprise, or alternatively consist of, a polynucleotide sequence in which the 3′ 10 polynucleotides of one of the sequences delineated in column 6 of Table 1B and the 5′ 10 polynucleotides of another sequence in column 6 corresponding to the same Clone ID NO:Z (see Table 1B, column 1) are directly contiguous. Nucleic acids which hybridize to the complement of these 20 lower stringency conditions, are also encompassed by the invention. Polypeptides encoded by these polynucleotides and/or nucleic acids, other polynucleotides and/or nucleic acids encoding these polypeptides, and antibodies that bind these polypeptides are also encompassed by the invention. Additionally, fragments and variants of the above-described polynucleotides, nucleic acids, and polypeptides are also encompassed by the invention.

[0082] In specific embodiments, polynucleotides of the invention comprise, or alternatively consist of, a polynucleotide sequence in which the 3′ 10 polynucleotides of one sequence in column 6 corresponding to the same contig sequence identifer SEQ ID NO:X (see Table 1B, column 2) are directly contiguous. Nucleic acids which hybridize to the complement of these 20 contiguous polynucleotides under stringent hybridization conditions or alternatively, under lower stringency conditions, are also encompassed by the invention. Polypeptides encoded by these polynucleotides and/or nucleic acids, other polynucleotides and/or nucleic acids encoding these polypeptides, and antibodies that bind these polypeptides are also encompassed by the invention. Additionally, fragments and variants of the above-described polynucleotides, nucleic acids, and polypeptides are also encompassed by the invention.

[0083] In specific embodiments, polynucleotides of the invention comprise, or alternatively consist of a polynucleotide sequence in which the 3′ 10 polynucleotides of one of the sequences delineated in column 6 of Table 1B and the 5′ 10 polynucleotides of another sequence in column 6 corresponding to the same row are directly contiguous. In preferred embodiments, the 3′ 10 polynucleotides of one of the sequences delineated in column 6 of Table 1B is directly contiguous with the 5′ 10 polynucleotides of the next sequential exon delineated in Table 1B, column 6. Nucleic acids which hybridize to the complement of these 20 contiguous polynucleotides under stringent hybridization conditions or alternatively, under lower stringency conditions, are also encompassed by the invention. Polypeptides encoded by these polynucleotides and/or nucleic acids, other polynucleotides and/or nucleic acids encoding these polypeptides, and antibodies that bind these polypeptides are also encompassed by the invention. Additionally, fragments and variants of the above-described polynucleotides, nucleic acids, and polypeptides are also encompassed by the invention.

[0084] Many polynucleotide sequences, such as EST sequences, are publicly available and accessible through sequence databases and may have been publicly available prior to conception of the present invention. Preferably, such related polynucleotides are specifically excluded from the scope of the present invention. Accordingly, for each contig sequence (SEQ ID NO:X) listed in the fourth column of Table 1A, preferably excluded are one or more polynucleotides comprising a nucleotide sequence described by the general formula of a−b, where a is any integer between 1 and the final nucleotide minus 15 of SEQ ID NO:X, b is an integer of 15 to the final nucleotide of SEQ ID NO:X, where both a and b correspond to the positions of nucleotide residues shown in SEQ ID NO:X, and where b is greater than or equal to a+14. More specifically, preferably excluded are one or more polynucleotides comprising a nucleotide sequence described by the general formula of a−b, where a and b are integers as defined in columns 4 and 5, respectively, of Table 3. In specific embodiments, the polynucleotides of the invention do not consist of at least one, two, three, four, five, ten, or more of the specific polynucleotide sequences referenced by the Genbank Accession No. as disclosed in column 6 of Table 3 (including for example, published sequence in connection with a particular BAC clone). In further embodiments, preferably excluded from the invention are the specific polynucleotide sequence(s) contained in the clones corresponding to at least one, two, three, four, five, ten, or more of the available material having the accession numbers identified in the sixth column of this Table (including for example, the actual sequence contained in an identified BAC clone). In no way is this listing meant to encompass all of the sequences which may be excluded by the general formula, it is just a representative example. All references available through these accessions are hereby incorporated by reference in their entirety.

TABLE 3

| | SEQ | | | | |
|---|---|---|---|---|---|
| | ID | | | | |
| Clone ID | NO: | Contig | EST Disclaimer | | |
| NO: Z | X | ID: | Range of a | Range of b | Accession #'s |

| | | | | | | |
|---|---|---|---|---|---|---|
| HAJAU21 | 11 | 1007572 | 1-628 | 15-642 | AL045231, AI953200, | |
| | | | | | AW005541, AA513506, | |
| | | | | | Z20296, Y12226, | |
| | | | | | AB015317, X54424, | |
| | | | | | AJ224112, AJ224114, | |
| | | | | | A74844, and AJ224113. | |
| HMSKF13 | 12 | 708207 | 1-387 | 15-401 | AA148393, AC023891, and | |
| | | | | | AC023891. | |
| HHPFV44 | 13 | 1121866 | 1-683 | 15-697 | R98212, F06274, R87869, | |
| | | | | | and AF225971. | |
| HLHCT68 | 14 | 764745 | 1-425 | 15-439 | R91150, H67895, AI205078, | |
| | | | | | Z25012, C05212, Z30134, | |
| | | | | | AA194359, AC010344, | |
| | | | | | AC010344, AC010344, | |
| | | | | | AC008496, and AC008496. | |
| HTLAQ18 | 15 | 811792 | 1-649 | 15-663 | AA442624, AI382107, | |
| | | | | | AA009701, and AL133054. | |
| HE6FD03 | 16 | 1153880 | 1-837 | 15-851 | AA431537, AW404444, | |
| | | | | | AI283081, AI355127, | |
| | | | | | AA431213, AI241247, | |
| | | | | | AI025060, AI017479, | |
| | | | | | AI276732, AA737782, | |
| | | | | | AI351906, AA700252, | |
| | | | | | AI564874, AA861742, | |
| | | | | | AI864024, AI051964, | |
| | | | | | Z40548, AA976182, | |
| | | | | | AI363484, AI350761, | |
| | | | | | AA688143, AI160881, | |
| | | | | | AA662752, AI028241, | |
| | | | | | R84964, AI332354, F08983, | |
| | | | | | AI471267, R78868, | |
| | | | | | AA670442, AI920956, | |
| | | | | | AA312704, AC000097, | |
| | | | | | AC006547, AC000083, | |
| | | | | | AC003060, AC005664, and | |
| | | | | | AJ236691. | |
| HEQAY32 | 17 | 869178 | 1-1169 | 15-1183 | AA459604, AA703415, | |
| | | | | | AA703508, AI337830, | |
| | | | | | AI924185, AA993540, | |
| | | | | | AA398958, AA047107, | |
| | | | | | AI581879, R50486, | |
| | | | | | AA399541, AA826082, | |
| | | | | | AA047244, AI570681, | |
| | | | | | AW007699, AA742413, | |
| | | | | | AI278602, AI479681, | |
| | | | | | AA810070, AI346375, | |
| | | | | | AI468327, AA766769, | |
| | | | | | AI721136, AA317334, | |
| | | | | | AI378094, H08229, | |
| | | | | | AA878088, AI269575, | |
| | | | | | T36249, AA878089, | |
| | | | | | M78847, H08868, | |
| | | | | | AW138078, AA322162, | |
| | | | | | AI824732, F04540, F04098, | |
| | | | | | AI383526, F02816, R50380, | |
| | | | | | AA383971, AI444981, | |
| | | | | | AI953863, and AB033004. | |
| HSSJM44 | 18 | 871067 | 1-1034 | 15-1048 | AA402834, AA313382, | |
| | | | | | T75200, H10173, Z46198, | |
| | | | | | T34442, R13072, | |
| | | | | | AA357096, AA383450, | |
| | | | | | T07941, AC026352, | |
| | | | | | AC026352, AC069443, | |
| | | | | | AC069443, AC068755, and | |
| | | | | | AC068755. | |
| HOFMT55 | 19 | 1083824 | 1-663 | 15-677 | | |
| HYAAU65 | 20 | 909956 | 1-581 | 15-595 | T81523, T98761, | |
| | | | | | AL080117, AB023176, | |
| | | | | | U14103Nov 22 2000 | |
| | | | | | 3:26:56: and 380AM. | |
| HAHEF22 | 21 | 910996 | 1-872 | 15-886 | AA447298. | |
| HPDVO67 | 22 | 1173157 | 1-1135 | 15-1149 | AI963225, AI758877, | |
| | | | | | AI807994, AW150122, | |
| | | | | | AI248930, AA292182, | |
| | | | | | AI708051, AI142918, | |
| | | | | | AA993485, AW001319, | |
| | | | | | AI798505, AI218504, | |
| | | | | | AA983431, AA196524, | |
| | | | | | AA633225, AI306679, | |
| | | | | | R48227, AA897389, | |
| | | | | | AA399226, AI734849, | |
| | | | | | R54747, AW072089, | |
| | | | | | AA405765, AA476847, | |
| | | | | | AA405846, R48226, | |
| | | | | | AA865971, AA402159, | |
| | | | | | AA290822, AA954879, | |
| | | | | | AA291888, AW082573, | |
| | | | | | AA410677, AA402040, | |
| | | | | | AA235386, AA954094, | |
| | | | | | AA284936, AI471266, | |
| | | | | | AW374525, AW374552, | |
| | | | | | AW351832, AI267732, | |
| | | | | | AW374499, AW374468, | |
| | | | | | AC005954, AF023617, and | |
| | | | | | Z61317. | |
| HFKKS58 | 23 | 1152246 | 1-1444 | 15-1458 | AW246359, AW246572, | |
| | | | | | AA827562, AA514488, | |
| | | | | | AL135673, AI539185, | |
| | | | | | AA459956, AI190270, | |
| | | | | | AA778031, AA083889, | |
| | | | | | AI539830, AL134250, | |
| | | | | | AA255533, AA460045, | |
| | | | | | AA532881, AA083888, | |
| | | | | | F19104, AA384265, | |
| | | | | | AA749416, AI972095, | |
| | | | | | AA247961, AA702934, | |
| | | | | | N66268, AA364111, | |
| | | | | | AI630888, AA255505, | |
| | | | | | AW438881, N79931, | |
| | | | | | AA729375, AA334602, | |
| | | | | | AW363733, T06791, and | |
| | | | | | AF116910. | |
| HTFBE02 | 24 | 1199605 | 1-1364 | 15-1378 | AI923217, AA197141, | |
| | | | | | AI814569, AI762903, | |
| | | | | | AI804682, AI804663, | |
| | | | | | AI143304, AA197116, | |
| | | | | | AI082030, AI911904, | |
| | | | | | AI139520, R92413, | |
| | | | | | AW274978, W93272, | |
| | | | | | AI183410, AW450838, | |
| | | | | | AI216343, AA680119, | |
| | | | | | AI918971, C15320, | |
| | | | | | W93273, F00607, | |
| | | | | | AI823928, T51116, Z19397, | |
| | | | | | T96093, R92414, T51024, | |
| | | | | | D53214, AI422647, | |
| | | | | | AI216344, AI741425, | |
| | | | | | AI936703, T96094, R42713, | |
| | | | | | AI869077, F00114, C00216, | |
| | | | | | R17362, Z66165, and | |
| | | | | | Z56024. | |
| HCEOR02 | 25 | 921110 | 1-545 | 15-559 | AA325666. | |
| HLMDO95 | 26 | 928344 | 1-469 | 15-483 | AC020641. | |
| HCEMY90 | 27 | 932927 | 1-592 | 15-606 | AA324130, AA361570, | |
| | | | | | R12848, AF214633, | |
| | | | | | AF214633, AC024242, and | |
| | | | | | AC024242. | |
| HBGQN46 | 28 | 945370 | 1-888 | 15-902 | AA479990, AW293680, | |
| | | | | | AI473367, AI184880, | |
| | | | | | AI086741, AI081183, | |
| | | | | | AI214276, AA742259, | |
| | | | | | AA836754, R55060, | |
| | | | | | AA251267, AI285889, | |
| | | | | | AI813391, AW297831, | |
| | | | | | AI819671, AF038458, and | |
| | | | | | AF038458. | |
| HTEPK69 | 29 | 951188 | 1-1255 | 15-1269 | AL046787, Z78359, | |
| | | | | | R24919, H62992, W39450, | |
| | | | | | H24270, AA364532, | |
| | | | | | Z41904, AA305651, | |
| | | | | | AI739068, AA325114, | |
| | | | | | AI750479, AA101388, | |
| | | | | | AA346082, AI469164, | |
| | | | | | AA417722, AA076212, | |
| | | | | | AI016444, AB029031, | |
| | | | | | Y17923, and I86429. | |
| HRODF07 | 30 | 952426 | 1-324 | 15-338 | AC011597, and AC023402. | |
| HUJDC24 | 31 | 953517 | 1-1408 | 15-1422 | AI467849, AI742229, | |
| | | | | | AW148851, AI916736, | |
| | | | | | AI281433, AA804534, | |
| | | | | | AI564217, AI523942, | |
| | | | | | AW364769, AW299493, | |
| | | | | | AI620008, AI123945, | |
| | | | | | AI377579, Z78359, | |
| | | | | | AI191913, AI610109, | |
| | | | | | AW085483, AA923067, | |
| | | | | | AI769651, AI928062, | |
| | | | | | AI078678, AA854786, | |
| | | | | | AI025849, AI581271, | |
| | | | | | AA609195, AA812157, | |
| | | | | | AI150639, AI261346, | |
| | | | | | AI433379, AA599239, | |
| | | | | | AI743119, AW194073, | |
| | | | | | AI760076, AA507048, | |
| | | | | | AI041747, AW002493, | |
| | | | | | AW391749, AI492025, | |
| | | | | | AA890051, AA113313, | |
| | | | | | AA004830, C06203, | |
| | | | | | AW169615, AA814762, | |
| | | | | | C75084, AI814568, | |
| | | | | | AA631549, AW408517, | |
| | | | | | AA079540, AI245591, | |
| | | | | | AA317350, AI025449, | |
| | | | | | AI017117, H62870, | |
| | | | | | AL046787, AW269195, | |
| | | | | | AA953576, AA083323, | |
| | | | | | AW079439, AI655457, | |
| | | | | | AA890518, H22877, | |
| | | | | | AA861351, AA768236, | |
| | | | | | AA079508, H65006, | |
| | | | | | AW075096, H65005, | |
| | | | | | AI538604, T30796, | |
| | | | | | AA004983, AA384663, | |
| | | | | | AA380072, AA364532, | |
| | | | | | AA180878, AA054836, | |
| | | | | | R67437, Z38201, | |
| | | | | | AA648532, W38371, | |
| | | | | | AA180892, AW407493, | |
| | | | | | AI739068, R24919, H62992, | |
| | | | | | AB029031, Y17923, and | |
| | | | | | I86429. | |
| HNHCI32 | 32 | 861673 | 1-586 | 15-600 | AF112462, and AR035954. | |
| HUVDR03 | 33 | 1212685 | 1-3158 | 15-3172 | AA768846, AI671768, | |
| | | | | | AI961239, AI884699, | |
| | | | | | AA514474, AI679628, | |
| | | | | | AI521280, AA156958, | |
| | | | | | AI139530, AI885479, | |
| | | | | | AI336225, AI186828, | |
| | | | | | AI735075, AI626081, | |
| | | | | | AI494518, AI275985, | |
| | | | | | AA749446, AI914010, | |
| | | | | | AI921928, AW207720, | |
| | | | | | AI130746, AA993271, | |
| | | | | | AI130728, AI299980, | |
| | | | | | AA976621, W69667, | |
| | | | | | AI279330, AA229014, | |
| | | | | | AA742981, R19745, | |
| | | | | | AA156866, AI216523, | |
| | | | | | AA255782, AI811823, | |
| | | | | | R84393, AA488821, | |
| | | | | | AI419263, AA489068, | |
| | | | | | AA229863, AA701250, | |
| | | | | | AA705638, N47318, | |
| | | | | | AA229731, AW271763, | |
| | | | | | AA687125, AA862901, | |
| | | | | | AL044304, AW372345, | |
| | | | | | AW272381, AA939081, | |
| | | | | | W73428, AI478491, | |
| | | | | | AW089880, AA702739, | |
| | | | | | AA765337, AW021871, | |
| | | | | | F06156, AA977247, | |
| | | | | | AI141957, W73367, | |
| | | | | | AI283582, W45513, | |
| | | | | | AA127066, R84392, | |
| | | | | | AI985183, AW439593, | |
| | | | | | AI560741, AI687916, | |
| | | | | | AI186368, AI203537, | |
| | | | | | AA047572, W69666, | |
| | | | | | H66133, AI081094, | |
| | | | | | AA453238, AA463404, | |
| | | | | | AW294792, AA356896, | |
| | | | | | AA318684, H66549, | |
| | | | | | AL046248, AA373158, | |
| | | | | | AA011074, AL046015, | |
| | | | | | Z25224, AA480226, | |
| | | | | | AW292636, H43300, | |
| | | | | | AI222506, W24708, | |
| | | | | | AA492470, T47922, | |
| | | | | | AA579885, T47923, | |
| | | | | | AA348753, T05906, | |
| | | | | | AA455850, H43299, | |
| | | | | | AW292633, AA011075, | |
| | | | | | AI419633, D61430, | |
| | | | | | AA772416, AI587496, | |
| | | | | | AA147480, N92391, | |
| | | | | | AA378964, R45164, | |
| | | | | | AA714016, AA130104, | |
| | | | | | AI560507, AW272813, | |
| | | | | | AW376847, AI471022, | |
| | | | | | H16172, AI568064, R68334, | |
| | | | | | AI567645, AW376809, | |
| | | | | | W45654, AA256004, | |
| | | | | | AA280280, AL133683, | |
| | | | | | AA378963, AA341472, | |
| | | | | | AA887264, AA147880, | |
| | | | | | AA704633, AA429202, | |
| | | | | | AI905673, AI216605, | |
| | | | | | AW168495, C14179, | |
| | | | | | AI963999, AC020663, | |
| | | | | | U70255, L06564, X89268, | |
| | | | | | and AF005380. | |
| HLTCT21 | 34 | 975033 | 1-1305 | 15-1319 | AA001257, AW390109, | |
| | | | | | AA149562, C05730, | |
| | | | | | AI342264, AI274957, | |
| | | | | | AI139524, AA151642, | |
| | | | | | AA467756, AI132915, | |
| | | | | | AW390186, AI683026, | |
| | | | | | AA467995, AI921624, | |
| | | | | | AA002262, AI624444, | |
| | | | | | AI302167, AI347041, | |
| | | | | | AI382066, AI888857, | |
| | | | | | AI041643, AI283206, | |
| | | | | | AI160682, AI393801, | |
| | | | | | AW391467, T93307, | |
| | | | | | AA379905, AI094800, | |
| | | | | | AA856948, AW391475, | |
| | | | | | AI312598, AI000325, | |
| | | | | | AI289177, AI310436, | |
| | | | | | H15978, AA565691, | |
| | | | | | AA885184, AI278759, | |
| | | | | | AI342194, AI083948, | |
| | | | | | AI921687, AI347545, | |
| | | | | | D83882, AA453766, | |
| | | | | | C05795, AW297678, | |
| | | | | | AA922168, N94588, | |
| | | | | | AI801674, AI679825, | |
| | | | | | AW008455, AA358043, | |
| | | | | | AI679249, AA115793, | |
| | | | | | AI697006, AI493351, | |
| | | | | | AI630853, W60406, | |
| | | | | | W52946, AI351551, | |
| | | | | | AA453850, AI302459, | |
| | | | | | AI907019, AW365995, | |
| | | | | | AW365918, AA862930, | |
| | | | | | AW381563, AW365896, | |
| | | | | | AW069527, AA467938, | |
| | | | | | AI421230, AA358042, | |
| | | | | | T30922, AW082407, | |
| | | | | | AI559167, AI784345, | |
| | | | | | AA889377, AI174263, | |
| | | | | | T08780, AI126061, | |
| | | | | | AA468056, AI094399, | |
| | | | | | AW379998, T93984, | |
| | | | | | AI264468, AI378984, | |
| | | | | | Z39023, AF010127, | |
| | | | | | A84918, AF015450, | |
| | | | | | A86556, AF009618, | |
| | | | | | AF041458, A84924, | |
| | | | | | AF005774, AF041461, | |
| | | | | | AF041460, AF015451, | |
| | | | | | AF041459, AF009616, | |
| | | | | | AF041462, AC007283, | |
| | | | | | AF009617, AF009619, | |
| | | | | | AF015452, U97075, | |
| | | | | | A84916, AF005775, and | |
| | | | | | A86558. | |
| HLHGH34 | 35 | 1023772 | 1-1529 | 15-1543 | AI056280, AA399001, | |
| | | | | | N31314, AL120264, | |
| | | | | | AA399591, R95732, | |
| | | | | | AA224343, R58162, | |
| | | | | | AA699899, AJ223333, | |
| | | | | | AF045888, and AF012128. | |
| HFXBN61 | 36 | 1172816 | 1-1255 | 15-1269 | AA478265, AA428837, | |
| | | | | | AA496285, AA478321, | |
| | | | | | R17757, R37358, R67163, | |
| | | | | | AA400943, AA400877, | |
| | | | | | R19123, R11880, R44789, | |
| | | | | | and U87305. | |
| HSLFT94 | 37 | 1199828 | 1-1387 | 15-1401 | | |
| HELGW31 | 38 | 610003 | 1-1645 | 15-1659 | C14389, D80268, | |
| | | | | | AW177440, AW177501, | |
| | | | | | AW177511, AW352117, | |
| | | | | | D81026, D59502, AI905856, | |
| | | | | | AW178893, T03269, | |
| | | | | | C14014, AA305578, | |
| | | | | | AW179328, AW366296, | |
| | | | | | AW360811, AW375405, | |
| | | | | | AA514188, D58283, | |
| | | | | | D59859, D80022, C14331, | |
| | | | | | D80166, D80195, D80193, | |
| | | | | | D59927, D59467, D51423, | |
| | | | | | D59619, D80210, D51799, | |
| | | | | | D80391, D80164, D59275, | |
| | | | | | D80240, D80253, D80043, | |
| | | | | | D59787, D80227, | |
| | | | | | AW378532, D81030, | |
| | | | | | D80212, D80196, D80188, | |
| | | | | | D80219, AW176467, | |
| | | | | | C15076, D80269, D80038, | |
| | | | | | D59610, D57483, D80366, | |
| | | | | | AA305409, C14429, | |
| | | | | | D51022, D50979, D50995, | |
| | | | | | D59889, AW178762, | |
| | | | | | D80024, AW377671, | |
| | | | | | D80378, AW178775, | |
| | | | | | AW360844, AW360817, | |
| | | | | | D80241, D51060, | |
| | | | | | AW352158, AW375406, | |
| | | | | | D80248, AW378534, | |
| | | | | | AW179332, AW377672, | |
| | | | | | AW179023, AW178905, | |
| | | | | | D80134, D80045, D80132, | |
| | | | | | D51097, AW352170, | |
| | | | | | D58253, AW352171, | |
| | | | | | D80522, AW377676, | |
| | | | | | AW177731, AW178907, | |
| | | | | | AW179019, AW179024, | |
| | | | | | D80251, AA514186, | |
| | | | | | C75259, D80133, | |
| | | | | | AW178906, AW177505, | |
| | | | | | AW179020, AW178909, | |
| | | | | | AW177456, AW179329, | |
| | | | | | AW178980, AW177733, | |
| | | | | | AW378528, AW178908, | |
| | | | | | AW178754, AW179018, | |
| | | | | | AW179004, AW178914, | |
| | | | | | AW178911, AW367967, | |
| | | | | | AW352174, D80302, | |
| | | | | | AW178774, AW177723, | |
| | | | | | D80439, D80247, T48593, | |
| | | | | | AI535850, AW178983, | |
| | | | | | D51103, AW367950, | |
| | | | | | C14975, AW178986, | |
| | | | | | D45260, AI525913, Y17188, | |
| | | | | | X82626, A84916, A67220, | |
| | | | | | D89785, A62300, A62298, | |
| | | | | | A78862, D34614, D26022, | |
| | | | | | D88547, AJ132110, | |
| | | | | | AR018138, X67155, | |
| | | | | | A25909, AF058696, | |
| | | | | | AR008278, Y12724, | |
| | | | | | AR025207, AB028859, | |
| | | | | | AB012117, A94995, | |
| | | | | | A85396, D88507, | |
| | | | | | AR066482, A44171, | |
| | | | | | A85477, AR008443, I19525, | |
| | | | | | A86792, I18367, X93549, | |
| | | | | | I50126, I50132, I50128, | |
| | | | | | I50133, AR066488, A82595, | |
| | | | | | AR066490, AR016514, | |
| | | | | | D50010, D13509, | |
| | | | | | AR060138, A45456, | |
| | | | | | A26615, AR052274, | |
| | | | | | Y09669, AR060385, | |
| | | | | | AB002449, AR066487, | |
| | | | | | A43192, A43190, | |
| | | | | | AR038669, A30438, | |
| | | | | | AR008408, U79457, | |
| | | | | | AF135125, AR060133, | |
| | | | | | AR008382Nov 22 2000 | |
| | | | | | 12:53:15: and 800AM. | |
| HDJME16 | 39 | 1206706 | 1-1559 | 15-1573 | AL046450, AW296638, | |
| | | | | | AW027431, N25289, | |
| | | | | | AA653247, AA916161, | |
| | | | | | AA343865, AF135440, and | |
| | | | | | AL137459. | |
| HISAR63 | 40 | 1199655 | 1-1629 | 15-1643 | AA778721, AI309326 | |
| | | | | | AI923088, AW157189, | |
| | | | | | AW009559, N21676, | |
| | | | | | AW277241, AI015567, | |
| | | | | | AA142926, AA935517, | |
| | | | | | AI340068, N71214, | |
| | | | | | AA046446, AI890415, | |
| | | | | | AA313266, AI760248, | |
| | | | | | AI421490, AI423473, | |
| | | | | | AA576688, AI342399, | |
| | | | | | AA946956, AW163161, | |
| | | | | | AA826534, AA143149, | |
| | | | | | AA056157, AI803454, | |
| | | | | | AA125818, AA233629, | |
| | | | | | N22011, AA594414, | |
| | | | | | AA405935, AI862039, | |
| | | | | | AA315935, AW148924, | |
| | | | | | AI245757, AW374039, | |
| | | | | | N80237, AA488928, | |
| | | | | | AW304989, W33046, | |
| | | | | | AA782164, AW403205, | |
| | | | | | H89121, T78059, AI953431, | |
| | | | | | AI344475, AA074821, | |
| | | | | | AI148049, AI707964, | |
| | | | | | AA864308, AA702036, | |
| | | | | | AA058701, AA034997, | |
| | | | | | AW057651, AA045662, | |
| | | | | | AA084570, AA172038, | |
| | | | | | AW438849, AA743021, | |
| | | | | | AI708566, AA045663, | |
| | | | | | C05053, AW268698, | |
| | | | | | AW078896, AA312059, | |
| | | | | | AA894905, AA586355, | |
| | | | | | AA947891, AA724345, | |
| | | | | | AI024387, AI631228, | |
| | | | | | AA878972, W38328, | |
| | | | | | AL048109, AA125949, | |
| | | | | | T59457, F13274, | |
| | | | | | AA172290, AA831417, | |
| | | | | | AI905071, AA047840, | |
| | | | | | H06542, AA053980, | |
| | | | | | N31289, AA135017, | |
| | | | | | AW337421, AA373169, | |
| | | | | | H06484, T06616, | |
| | | | | | AA837059, T77300, | |
| | | | | | AW295581, Z39935, | |
| | | | | | AA759329, N31083, | |
| | | | | | R39702, F10872, | |
| | | | | | AA057237, T36230, | |
| | | | | | H89228, Z43869, | |
| | | | | | AA598442, AA233777, | |
| | | | | | AA056096, D53439, | |
| | | | | | AA035459, AA484066, | |
| | | | | | AA018173, R96192, | |
| | | | | | AA693386, AL048108, | |
| | | | | | AW392317, AI090106, | |
| | | | | | AA732389, AW150491, | |
| | | | | | AI270737, R38185, Z37004, | |
| | | | | | AA501472, AA483236, | |
| | | | | | T19033, AA749100, | |
| | | | | | W04596, H41069, | |
| | | | | | AI200780, AA580553, | |
| | | | | | AA405183, T18978, | |
| | | | | | N56489, AW189389, | |
| | | | | | AA079574, D19937, | |
| | | | | | AI905101, AR044461, and | |
| | | | | | AF061739. | |
| HE8DL23 | 41 | 693641 | 1-487 | 15-501 | W78996, AW172850, | |
| | | | | | AW169307, AW401638, | |
| | | | | | AA399131, AA251893, | |
| | | | | | AI361767, AB015318, | |
| | | | | | AF068706, AF068707, | |
| | | | | | AL135999, and AL135999. | |
| HAJCL60 | 42 | 1218435 | 1-1988 | 15-2002 | AA626698, AW004763, | |
| | | | | | AL042663, C00237, | |
| | | | | | M13442, M13443, | |
| | | | | | AR051318, K03460, | |
| | | | | | AF172400, AR023871, | |
| | | | | | A76335, S83440, X52308, | |
| | | | | | U79414, AF026124, | |
| | | | | | AR038854, AF017790, | |
| | | | | | X59813, AF000167, | |
| | | | | | AL096720, AL133655, | |
| | | | | | E01314, and AF078852. | |
| HNGJI55 | 43 | 722240 | 1-290 | 15-304 | | |
| HSDIF59 | 44 | 1207943 | 1-1363 | 15-1377 | | |
| HKABW26 | 45 | 1127499 | 1-776 | 15-790 | AI801903, AI768712, | |
| | | | | | AI333177, AI805900, | |
| | | | | | AA588685, AW294927, | |
| | | | | | AI492047, AI302255, | |
| | | | | | AW166321, AA973387, | |
| | | | | | N22140, AA808664, | |
| | | | | | N71516, AA215502, | |
| | | | | | AA029037, AA099693, | |
| | | | | | AA927014, AA099692, | |
| | | | | | AA768510, H47467, | |
| | | | | | AW291894, AL039390, | |
| | | | | | AL046681, AI890907, | |
| | | | | | AL046137, AI926046, | |
| | | | | | AI049726, AI249936, | |
| | | | | | AA598862, AL042009, | |
| | | | | | AI672187, AL042551, | |
| | | | | | AL047188, AA446038, | |
| | | | | | AL044204, AI926327, | |
| | | | | | AI920975, AL045166, | |
| | | | | | AI446483, AL120789, | |
| | | | | | AL045503, AW337394, | |
| | | | | | AI888581, AL043088, | |
| | | | | | AL134357, Z99289, and | |
| | | | | | AF201334. | |
| HE9HE89 | 46 | 1189795 | 1-2118 | 15-2132 | AI801903, AI768712, | |
| | | | | | AI333177, AW020553, | |
| | | | | | AA621052, D60213, | |
| | | | | | AA310511, AI805900, | |
| | | | | | AW294927, AI613127, | |
| | | | | | AI492047, AI302255, | |
| | | | | | N51701, AW166321, | |
| | | | | | AA973387, AI908563, | |
| | | | | | AI525785, N48792, | |
| | | | | | AI719605, AA588685, | |
| | | | | | AI077404, AI243385, | |
| | | | | | AA573234, AI284732, | |
| | | | | | AA345848, AA808664, | |
| | | | | | AA587950, N71516, | |
| | | | | | AA278670, AA215502, | |
| | | | | | D60202, N22140, | |
| | | | | | AA278202, AA327840, | |
| | | | | | AI080061, AA029037, | |
| | | | | | AA099693, AI862953, | |
| | | | | | D60212, D60201, N45583, | |
| | | | | | N64148, AA099692, | |
| | | | | | AA927014, AA768510, | |
| | | | | | H47467, AW291894, | |
| | | | | | AA446038, AF201334, and | |
| | | | | | Z99289. | |
| HEONO59 | 47 | 741361 | 1-848 | 15-862 | W37916, AW369323, | |
| | | | | | AL138197, AA292636, | |
| | | | | | AA789205, AA278688, | |
| | | | | | AI077497, AI670821, | |
| | | | | | AW117287, AA608906, | |
| | | | | | AA382777, AA724269, | |
| | | | | | AA278680, AA827227, | |
| | | | | | AI160796, AA600253, | |
| | | | | | AI990171, AA625768, | |
| | | | | | W37874, AA421286, | |
| | | | | | AA292637, AA844108, | |
| | | | | | AA917528, AW316905, | |
| | | | | | AA768446, and AF117210. | |
| HE6BQ76 | 48 | 775616 | 1-353 | 15-367 | AA099543, AA669197, | |
| | | | | | AA127290, R18710, | |
| | | | | | H08922, W79474, | |
| | | | | | AW118919, AW304022, | |
| | | | | | N41498, AA213595, | |
| | | | | | W86555, H51174, Z25317, | |
| | | | | | AA304745, AI609937, | |
| | | | | | H57648, AF083033, | |
| | | | | | AR028451, AF072860, | |
| | | | | | Z84477, and AF083032. | |
| HDPYE27 | 49 | 1216489 | 1-2302 | 15-2316 | AL134742, AA778440, | |
| | | | | | N37091, N75091, | |
| | | | | | AA639654, AW022145, | |
| | | | | | AW007159, AI683811, | |
| | | | | | AA053789, AI122783, | |
| | | | | | AI744925, AI467948, | |
| | | | | | N50027, AA057679, | |
| | | | | | N77557, AI445747, N28928, | |
| | | | | | AA243776, AI363334, | |
| | | | | | AI336372, AI963359, | |
| | | | | | AI040028, AI479455, | |
| | | | | | AA165101, AW385014, | |
| | | | | | AI500179, AI697381, | |
| | | | | | W37774, AI339917, | |
| | | | | | AI653997, AA693500, | |
| | | | | | AI806196, AA228021, | |
| | | | | | AI333501, AI142930, | |
| | | | | | N21339, W60875, | |
| | | | | | AI431532, AA035737, | |
| | | | | | AI632712, AA063622, | |
| | | | | | W73050, AA975536, | |
| | | | | | AA576042, AI124024, | |
| | | | | | AI658995, AI440474, | |
| | | | | | W60732, AI034259, | |
| | | | | | AA975579, AI311527, | |
| | | | | | AI969455, AI080681, | |
| | | | | | AW025344, N64476, | |
| | | | | | AI887691, AA926635, | |
| | | | | | AA281420, N35915, | |
| | | | | | AA278973, AI346272, | |
| | | | | | N62274, AA410201, | |
| | | | | | N67994, AA543095, | |
| | | | | | N27998, AI394262, | |
| | | | | | AA281380, C75130, | |
| | | | | | AA582148, AW341214, | |
| | | | | | AI061278, AI370984, | |
| | | | | | N43014, AI147848, | |
| | | | | | AI580843, AI983578, | |
| | | | | | R96110, N75197, | |
| | | | | | AA232786, W37990, | |
| | | | | | N95298, H97841, AI074120, | |
| | | | | | N36648, AI282107, | |
| | | | | | AA233347, R56367, | |
| | | | | | D56390, N36876, H04632, | |
| | | | | | N33506, AA130092, | |
| | | | | | AI797419, AA974076, | |
| | | | | | H42814, W80686, | |
| | | | | | AA766923, AI748830, | |
| | | | | | H21609, AI917261, | |
| | | | | | W80865, AI453342, | |
| | | | | | R32872, R31373, AI095232, | |
| | | | | | AA912662, AI915416, | |
| | | | | | M78700, AI002766, | |
| | | | | | W44789, W29011, N52321, | |
| | | | | | AI077579, AA314971, | |
| | | | | | N22321, N33338, AI026003, | |
| | | | | | AI830057, AW021634, | |
| | | | | | AI299595, AI246278, | |
| | | | | | AA558723, AA847542, | |
| | | | | | AI191815, AI765002 | |
| | | | | | R59115, AA743613, | |
| | | | | | AA730188, AI302598, | |
| | | | | | AI244544, H12348, T08244, | |
| | | | | | AA094999, T16664, | |
| | | | | | AI421363, N47433, | |
| | | | | | AW370192, N33351, | |
| | | | | | T34113, W07579, | |
| | | | | | AI873477, D58486, T30904, | |
| | | | | | R59114, AA814563, | |
| | | | | | F06223, AA776919, | |
| | | | | | AI274376, C04716, N46147, | |
| | | | | | AA665858, AW149733, | |
| | | | | | AA573244, N43000, | |
| | | | | | AA298197, T92184, | |
| | | | | | F12336, AA386234, | |
| | | | | | AI825897, AI333196, | |
| | | | | | C03677, T66084, | |
| | | | | | AA228112, C05913, | |
| | | | | | AA854336, Z39132, | |
| | | | | | R96072, R33003, N80416, | |
| | | | | | R78803, AI094600, F06176, | |
| | | | | | AI379933, R24775, | |
| | | | | | AI391739, T87636, R76203, | |
| | | | | | AA737626, AA082696, | |
| | | | | | AA302875, AI698554, | |
| | | | | | T31494, T56448, | |
| | | | | | AA296902, Z42327, | |
| | | | | | AA725147, AA370253, | |
| | | | | | AA290935, Z24957, | |
| | | | | | T09018, T30823, Z39088, | |
| | | | | | T08243, AA285111, | |
| | | | | | AA861783, AW193046, | |
| | | | | | H72982, AI127992, H89910, | |
| | | | | | AA298178, N46405, | |
| | | | | | AA243648, AA493205, | |
| | | | | | AA410182, H89911, | |
| | | | | | N42305, N87136, N62343, | |
| | | | | | Z28664, AI828386, | |
| | | | | | W24772, N80865, | |
| | | | | | AW386714, AI886156, | |
| | | | | | R35868, N92210, F13786, | |
| | | | | | AI866424, T35613, | |
| | | | | | AA384765, AA054617, | |
| | | | | | AA877058, D56703, | |
| | | | | | N26016, N43789, T92218, | |
| | | | | | R38141, AW380302, | |
| | | | | | AA300758, AI735379, | |
| | | | | | T31648, T35315, | |
| | | | | | AA096136, R33002, | |
| | | | | | AA486303, F05590, | |
| | | | | | AA310870, R38053, | |
| | | | | | D82417, R35869, N38773, | |
| | | | | | F01856, AA036707, | |
| | | | | | T34827, T30754, | |
| | | | | | AA809971, AI244054, | |
| | | | | | H72981, AF062347, | |
| | | | | | AF062346, AF062072, | |
| | | | | | AF062071, AL031779, | |
| | | | | | X75687, L37047, S77728, | |
| | | | | | and S77733. | |
| HDPCN94 | 50 | 1216484 | 1-2809 | 15-2823 | AI094945, AW338968, | |
| | | | | | AI126294, AW026228, | |
| | | | | | AI982584, AI589050, | |
| | | | | | AI309065, AA026692, | |
| | | | | | AI018447, AW003916, | |
| | | | | | AW338195, AA424111, | |
| | | | | | AI279956, AA400155, | |
| | | | | | AA952950, AA939286, | |
| | | | | | AI018115, AA400313, | |
| | | | | | R47388, AI290258, N93448, | |
| | | | | | D79950, W21217, | |
| | | | | | AI493787, AI263862, | |
| | | | | | AI338763, AI042507, | |
| | | | | | AI619662, AI567582, | |
| | | | | | AI620302, AI671642, | |
| | | | | | AW169653, AI309401, | |
| | | | | | AI499890, AI524654, | |
| | | | | | AW059713, AI800464, | |
| | | | | | AL037558, AI627988, | |
| | | | | | AI521005, N42321, | |
| | | | | | AI886415, AL036673, | |
| | | | | | AW151136, AL119863, | |
| | | | | | AI783530, AW020693, | |
| | | | | | AI254226, AI889168, | |
| | | | | | AL079963, AA494167, | |
| | | | | | AA287231, AI890507, | |
| | | | | | AL036631, AW163823, | |
| | | | | | AL079960, AI267162, | |
| | | | | | AW084447, AL038779, | |
| | | | | | AW074993, AW072484, | |
| | | | | | AI349614, AI573026, | |
| | | | | | AW193134, AW071380, | |
| | | | | | AI436429, AI273094, | |
| | | | | | AI282355, AI349256, | |
| | | | | | AI312152, AI307557, | |
| | | | | | AI345347, AA833760, | |
| | | | | | AI620093, AW075084, | |
| | | | | | AI687168, AI349937, | |
| | | | | | AW021373, AW302992, | |
| | | | | | AI345688, AI334884, | |
| | | | | | AI307543, AW051059, | |
| | | | | | AW071412, AI307708, | |
| | | | | | AI312325, AI340659, | |
| | | | | | AI687166, AI336633, | |
| | | | | | AI345567, AI334930, | |
| | | | | | AI309443, AI307520, | |
| | | | | | AW169604, AI340664, | |
| | | | | | AI349957, AL040241, | |
| | | | | | AI345739, AI312143, | |
| | | | | | AI345005, AI446373, | |
| | | | | | AI310927, AI589668, | |
| | | | | | AA640779, AI307578, | |
| | | | | | AI349955, AI580674, | |
| | | | | | AW075093, AI494201, | |
| | | | | | AI345143, AI312357, | |
| | | | | | AL119791, AL041150, | |
| | | | | | AW302965, AI254727, | |
| | | | | | AI343112, AI874166, | |
| | | | | | AI473451, AI582932, | |
| | | | | | AW074869, AW167918, | |
| | | | | | AA417129, AL036274, | |
| | | | | | AW301300, AI349598, | |
| | | | | | AA572758, AI538764, | |
| | | | | | AL036664, AW075207, | |
| | | | | | AI343037, AW161579, | |
| | | | | | AI345735, AI312428, | |
| | | | | | AW085786, AI866798, | |
| | | | | | AW022682, AI431424, | |
| | | | | | AI500714, AW023338, | |
| | | | | | AI358701, AW073898, | |
| | | | | | AA420722, AW105601, | |
| | | | | | AI284517, AI923989, | |
| | | | | | AI572717, AW080995, | |
| | | | | | AI307210, AI567612, | |
| | | | | | AI648684, AI648567, | |
| | | | | | AI433034, AI440263, | |
| | | | | | AI589267, AI310575, | |
| | | | | | AI313320, AI313352, | |
| | | | | | AI340533, AI349266, | |
| | | | | | AW072719, AI312146, | |
| | | | | | AI312339, AI309431, | |
| | | | | | AI345258, AI690748, | |
| | | | | | AI251221, AW161156, | |
| | | | | | AI590686, AI281757, | |
| | | | | | AI783504, AI311604, | |
| | | | | | AL048656, AI923370, | |
| | | | | | AW089572, AW071417, | |
| | | | | | AL047422, AI349269, | |
| | | | | | AI433157, AI702073, | |
| | | | | | AI310945, AI539153, | |
| | | | | | AI682593, AI340627, | |
| | | | | | AL120853, AL036980, | |
| | | | | | AW130863, AI630747, | |
| | | | | | AI345224, AI633125, | |
| | | | | | AI698391, AL046595, | |
| | | | | | AW083778, AI311892, | |
| | | | | | AI919593, AA983883, | |
| | | | | | AI889147, AA613907, | |
| | | | | | AA580663, AI670009, | |
| | | | | | AI889189, AI917963, | |
| | | | | | AI288285, AI890806, | |
| | | | | | AW196105, AW269097, | |
| | | | | | AI955906, AI918449, | |
| | | | | | AI872910, AI310925, | |
| | | | | | AI587121, AW163834, | |
| | | | | | AW072588, AI312399, | |
| | | | | | AW162194, AI933992, | |
| | | | | | AI537677, AW263804, | |
| | | | | | AI344826, AW268253, | |
| | | | | | AI345156, AI690946, | |
| | | | | | AI554821, AI348854, | |
| | | | | | AI307569, AL036802, | |
| | | | | | AI311159, AW079334, | |
| | | | | | AI336495, AI336654, | |
| | | | | | AI554343, AI567351, | |
| | | | | | AL036396, AI382670, | |
| | | | | | AL036403, AI950664, | |
| | | | | | AL039086, AW152182, | |
| | | | | | AA012905, AI307736, | |
| | | | | | AI345562, AI345026, | |
| | | | | | AI307454, AL038463, | |
| | | | | | AI348897, AI800433, | |
| | | | | | AF120323, AL122086, | |
| | | | | | AF120324, AB022915, | |
| | | | | | AF121102, AF195656, | |
| | | | | | I48978, A08916, A18777, | |
| | | | | | I89947, A08913, A08910, | |
| | | | | | AR038854, A08909, | |
| | | | | | A08912, A08908, I89931, | |
| | | | | | I49625, U42766, I89934, | |
| | | | | | I89944, AF141289, A08911, | |
| | | | | | X52128, A08907, U49908, | |
| | | | | | S36676, AL133557, | |
| | | | | | AF118094, I48979, | |
| | | | | | AF067790, E05822, | |
| | | | | | AF106862, Y09972, | |
| | | | | | A03736, AF106657, | |
| | | | | | A90832, AJ238278, | |
| | | | | | AL133560, U00763, | |
| | | | | | Y11254, AR068751, | |
| | | | | | U87620, Z97214, I03321, | |
| | | | | | AL117416, AL133113, | |
| | | | | | Y10080, AL080127, | |
| | | | | | AL049465, X70685, | |
| | | | | | X80340, AF111112, | |
| | | | | | AF091084, AL122050, | |
| | | | | | AL137550, AL137463, | |
| | | | | | AF113694, X87582, | |
| | | | | | AF100931, AL049283, | |
| | | | | | U35846, I96214, AR034830, | |
| | | | | | AL133568, AF162270, | |
| | | | | | U80742, AL110222, | |
| | | | | | AF118064, AL049466, | |
| | | | | | AL137554, AF061795, | |
| | | | | | AL122110, AL137271, | |
| | | | | | AF151685, AL122106, | |
| | | | | | AF146568, AF090943, | |
| | | | | | AL122093, AL117583, | |
| | | | | | AL050277, AF113690, | |
| | | | | | AF199509, AR013797, | |
| | | | | | A77033, A77035, | |
| | | | | | AF017152, AF097996, | |
| | | | | | AL137560, S78214, | |
| | | | | | AF158248, E12806, | |
| | | | | | Y07905, AL137660, | |
| | | | | | AL049464, E02349, | |
| | | | | | AC004227, I00734, Y16645, | |
| | | | | | AL080086, AF067728, | |
| | | | | | AF028823, AF090900, | |
| | | | | | I26207, AL049452, | |
| | | | | | AF113676, AL049430, | |
| | | | | | AL137705, X96540, | |
| | | | | | AL137530, X63162, | |
| | | | | | AL050024, AL050116, | |
| | | | | | M86826, AB007812, | |
| | | | | | AL137429, X82434, | |
| | | | | | AF090934, A07647, | |
| | | | | | AL110225, U91329, | |
| | | | | | AL080124, AL080163, | |
| | | | | | AF106827, AL110280, | |
| | | | | | AL122098, AF090896, | |
| | | | | | AL117649, AL110171, | |
| | | | | | AF026816, X57961, | |
| | | | | | X84990, AJ000937, | |
| | | | | | AL049300, U68233, | |
| | | | | | S61953, I92592, AF078844, | |
| | | | | | U68387, AF090886, | |
| | | | | | S69510, AL133075, | |
| | | | | | A76335, AL137526, | |
| | | | | | L19437, S76508, AL133080, | |
| | | | | | I41145, U58996, U78525, | |
| | | | | | AL133565, AL133606, | |
| | | | | | AL137521, AL133640, | |
| | | | | | AL137539, AF090903, | |
| | | | | | AL050149, X98834, | |
| | | | | | AF126247, AL117460, | |
| | | | | | AF087943, AR038969, | |
| | | | | | AF051325, AF031147, | |
| | | | | | AL137459, U72621, | |
| | | | | | AF079763, AJ242859, | |
| | | | | | AL122104, AF113691, | |
| | | | | | AF017437, AL122049, | |
| | | | | | AL117457, AL133665, | |
| | | | | | AL117435, AL137478, | |
| | | | | | I09499, AF125948, | |
| | | | | | AL080159, Y10936, | |
| | | | | | U95114, E00617, E00717, | |
| | | | | | E00778, AL133098, | |
| | | | | | AF113013, AR029490, | |
| | | | | | AF118070, AL137658, | |
| | | | | | U49434, AL133016, | |
| | | | | | AL023657, M30514, | |
| | | | | | X65873, L31396, | |
| | | | | | AF026124, AF113699, | |
| | | | | | AF079765, AL137529, | |
| | | | | | AL080060, AL050108, | |
| | | | | | AL137527, A65341, | |
| | | | | | AL050138, AL133014, | |
| | | | | | X93495, AL137300, | |
| | | | | | AL137548, AL117394, | |
| | | | | | A21103, X92070, E15569, | |
| | | | | | AJ003118, A15345, | |
| | | | | | AF113019, AF177401, | |
| | | | | | AL137283, AF061943, | |
| | | | | | AR020905, AL080140, | |
| | | | | | AL110196, AF137367, | |
| | | | | | A45787, AL133104, | |
| | | | | | AL080158, AL137533, | |
| | | | | | A18788, AL050015, | |
| | | | | | AR011880, AL137556, | |
| | | | | | AF030513, L31397, | |
| | | | | | AF132676, AL137712, | |
| | | | | | AF111849, A93350, | |
| | | | | | AF113677, AL137558, | |
| | | | | | AF061836, AF032666, | |
| | | | | | AL122111, AF012536, | |
| | | | | | AB019565, D83032, and | |
| | | | | | Z37987. | |
| HDPDH64 | 51 | 796509 | 1-506 | 15-520 | AI929457, AW249044, | |
| | | | | | AI739490, AB020706, | |
| | | | | | X14972, X53773, X14971, | |
| | | | | | and Z66177. | |
| HFIJC31 | 52 | 828148 | 1-519 | 15-533 | AA885328, N79858, and | |
| | | | | | AI184184. | |
| HACCH94 | 53 | 847143 | 1-1399 | 15-1413 | AI093369, AW292321, | |
| | | | | | AA972431, N40174, | |
| | | | | | AA746376, AA130392, | |
| | | | | | AA286750, AA287684, | |
| | | | | | R71586, R71568, R71587, | |
| | | | | | H03136, H03946, R71567, | |
| | | | | | AI471079, H97311, | |
| | | | | | AA365025, AF039686, | |
| | | | | | AF118670, AR034800, | |
| | | | | | AF081916, AL161458, and | |
| | | | | | AL161458. | |
| HSLAE47 | 54 | 1158024 | 1-497 | 15-511 | | |
| HTEED80 | 55 | 849075 | 1-1299 | 15-1313 | W87655, AA465429, | |
| | | | | | AA203572, AI479983, | |
| | | | | | AI540082, AA192438, | |
| | | | | | AA836236, AA465358, | |
| | | | | | AA829419, AA507269, | |
| | | | | | AW290970, AI796504, | |
| | | | | | AA904433, AA368409, | |
| | | | | | AA688079, AW189971, | |
| | | | | | AA601527, AA393948, | |
| | | | | | F36549, W87656, | |
| | | | | | AA320120, AI862710, | |
| | | | | | F30605, AA196706, and | |
| | | | | | AJ242978. | |
| HNTBH68 | 56 | 1109052 | 1-579 | 15-593 | AW157233, Z43649, | |
| | | | | | C15376, and R20382. | |
| HAJBU67 | 57 | 1186051 | 1-1680 | 15-1694 | AA436974, AW301595, | |
| | | | | | AI338889, AI627769, | |
| | | | | | AI148986, AW295167, | |
| | | | | | AI095891, AA228704, | |
| | | | | | AW300645, AA938998, | |
| | | | | | AW290959, AI584103, | |
| | | | | | W51788, AW239035, | |
| | | | | | AA631562, AA314478, | |
| | | | | | T30453, AA593364, | |
| | | | | | AA380939, AA593259, | |
| | | | | | D20778, AW148377, | |
| | | | | | T19553, AI371361, | |
| | | | | | AA380937, AA228703, | |
| | | | | | T19552, AW156939, | |
| | | | | | AI696364, AF132951, and | |
| | | | | | AW514097. | |
| HE2OI42 | 58 | 857135 | 1-1609 | 15-1623 | AW179274, AL037345, | |
| | | | | | T60653, AA297223, | |
| | | | | | AI222285, AA180256, | |
| | | | | | AI470271, AI569173, | |
| | | | | | AA654529, T57755, | |
| | | | | | AW374056, D26549, | |
| | | | | | X78479, U04354, Y13971, | |
| | | | | | and AC005281. | |
| HISAR24 | 59 | 1206561 | 1-1434 | 15-1448 | AA778721, AI309326, | |
| | | | | | AI923088, AW157189, | |
| | | | | | N21676, AW009559, | |
| | | | | | AW277241, AI015567, | |
| | | | | | AA142926, AA935517, | |
| | | | | | N71214, AI340068, | |
| | | | | | AA046446, AI890415, | |
| | | | | | AI760248, AI421490, | |
| | | | | | AI423473, AA576688, | |
| | | | | | AI342399, AA946956, | |
| | | | | | AA826534, AA143149, | |
| | | | | | AA594414, AA233629, | |
| | | | | | AI803454, AA125818, | |
| | | | | | N22011, AA313266, | |
| | | | | | AI953431, AI862039, | |
| | | | | | AW148924, AA315935, | |
| | | | | | AI245757, AW374039, | |
| | | | | | N80237, AA488928, | |
| | | | | | W33046, AW304989, | |
| | | | | | AA782164, H89121, | |
| | | | | | T78059, AI344475, | |
| | | | | | AW403205, AA074821, | |
| | | | | | AI148049, AI707964, | |
| | | | | | AA172038, AA864308, | |
| | | | | | AA702036, AW163161, | |
| | | | | | AA034997, AA058701, | |
| | | | | | AW057651, AA045662, | |
| | | | | | AA084570, AW438849, | |
| | | | | | AA743021, AI708566, | |
| | | | | | AA045663, C05053, | |
| | | | | | AA312059, AW268698, | |
| | | | | | AW078896, AA894905, | |
| | | | | | AA724345, AA586355, | |
| | | | | | AA947891, AA878972, | |
| | | | | | AI024387, AI631228, | |
| | | | | | AL048109, F13274, T59457, | |
| | | | | | AA831417, AA172290, | |
| | | | | | AI905071, H06542, | |
| | | | | | AA125949, AW337421, | |
| | | | | | H06484, T06616, N31289, | |
| | | | | | AA135017, T77300, | |
| | | | | | AA837059, AW295581, | |
| | | | | | AA759329, R39702, | |
| | | | | | Z39935, AA056157, | |
| | | | | | F10872, AA405935, | |
| | | | | | W38328, AA057237, | |
| | | | | | H89228, AA233777, | |
| | | | | | AA598442, AA056096, | |
| | | | | | D53439, AA035459, | |
| | | | | | AA373169, AA484066, | |
| | | | | | R96192, AA693386, | |
| | | | | | AL048108, AI090106, | |
| | | | | | AA732389, AI270737, | |
| | | | | | AA047840, AW392317, | |
| | | | | | AW150491, R38185, | |
| | | | | | Z37004, AA501472, | |
| | | | | | AA483236, AA749100, | |
| | | | | | H41069, W04596, | |
| | | | | | AI200780, AA053980, | |
| | | | | | AA580553, AA405183, | |
| | | | | | T18978, N31083, | |
| | | | | | AW189389, D19937, | |
| | | | | | AI905101, N56489, | |
| | | | | | AA079574, AI002285, | |
| | | | | | AR044461, AF061739, | |
| | | | | | A30543, I19505, U96138, | |
| | | | | | AL137283, and AF069506. | |
| HMEKO39 | 60 | 1228120 | 1-2051 | 15-2065 | AI832149, AA253498, | |
| | | | | | AA927669, AW136320, | |
| | | | | | AA284897, AI375638, | |
| | | | | | AI141878, AA410733, | |
| | | | | | AA724418, AI656580, | |
| | | | | | AA626359, AA633990, | |
| | | | | | AI341987, AA210941, | |
| | | | | | AA480438, AI499844, | |
| | | | | | AI498056, AW135997, | |
| | | | | | AA595691, AA209463, | |
| | | | | | AI804771, AI278733, | |
| | | | | | W52189, AI199374, | |
| | | | | | AA602519, AA253394, | |
| | | | | | AI189792, AI151483, | |
| | | | | | AI242359, AI278938, | |
| | | | | | AA456100, AI831279, | |
| | | | | | AA455603, N51328, | |
| | | | | | R55869, H22614, | |
| | | | | | AA496421, W96552, | |
| | | | | | T16865, R90921, R87952, | |
| | | | | | AI913942, AA284720, | |
| | | | | | AA904546, R55788, | |
| | | | | | R87953, R25653, T16864, | |
| | | | | | H20796, R90911, AI673432, | |
| | | | | | AI954640, R90922, | |
| | | | | | AI631375, AI380914, | |
| | | | | | AA969376, AI123164, | |
| | | | | | AI355743, R27502, | |
| | | | | | AA338810, and | |
| | | | | | AW243972. | |
| H7TBC95 | 61 | 865922 | 1-692 | 15-706 | | |
| HPMBZ21 | 62 | 867222 | 1-550 | 15-564 | AC005281, X78479, and | |
| | | | | | D26549. | |
| HLHTE91 | 63 | 789603 | 1-1196 | 15-1210 | AI124644, AA256351, | |
| | | | | | AA294967, R71807, | |
| | | | | | AA305696, AW276058, | |
| | | | | | AI631672, AI861834, | |
| | | | | | AI888075, and AB020698. | |
| HTEPX32 | 64 | 1134915 | 1-1348 | 15-1362 | AI217947, AW237109, | |
| | | | | | AI918745, AI968403, | |
| | | | | | AA934788, X84693, and | |
| | | | | | AW594564. | |
| HE8AM04 | 65 | 871156 | 1-506 | 15-520 | AA378845, AA332652, | |
| | | | | | AA331633, AL031774, | |
| | | | | | AL031774, AL031774, | |
| | | | | | AL138825, AL138825, and | |
| | | | | | AL138825. | |
| HIBEF26 | 66 | 871533 | 1-492 | 15-506 | AA351087, AA339704, | |
| | | | | | T31212, Z41917, | |
| | | | | | AW249404, C15783, | |
| | | | | | C15823, C15142, C14979, | |
| | | | | | Z99716, AF111179, | |
| | | | | | AF111180, AF104411, | |
| | | | | | AF111181, Z99716, Z99716, | |
| | | | | | and Z99716. | |
| HAOAE45 | 67 | 1114497 | 1-1118 | 15-1132 | AA481981, AA482086, | |
| | | | | | AA354345, AW440413, | |
| | | | | | AI679439, AA214170, | |
| | | | | | AI868537, AA090435, | |
| | | | | | AW089582, W02284, | |
| | | | | | AA313857, Z98048, | |
| | | | | | AF031380, and AF038172. | |
| HSDIT49 | 68 | 1169473 | 1-940 | 15-954 | AI526055. | |
| HTLHP64 | 69 | 1189793 | 1-1383 | 15-1397 | AI290476, AI811075, | |
| | | | | | AW070435, AA708916, | |
| | | | | | AA877889, AA243884, | |
| | | | | | AI673586, AA535517, | |
| | | | | | AI682428, R55643, | |
| | | | | | AI240304, R55421, H42362, | |
| | | | | | AI446297, AA243877, | |
| | | | | | AI784582, AA514267, | |
| | | | | | W05138, F16063, | |
| | | | | | AA502383, AA502905, | |
| | | | | | AA862373, H96943, and | |
| | | | | | N75418. | |
| HETKT65 | 70 | 1110514 | 1-803 | 15-817 | AL042941, AW408069, | |
| | | | | | T17359, M78292, R18937, | |
| | | | | | AW246248, and AL117408. | |
| HOHBY04 | 71 | 888190 | 1-725 | 15-739 | AW237906, H63227, | |
| | | | | | W88522, AL133245, | |
| | | | | | Y17267, AL133245, and | |
| | | | | | AL133245. | |
| HTFNP84 | 72 | 909687 | 1-2474 | 15-2488 | AI916675, AI823992, | |
| | | | | | AW082308, AI816135, | |
| | | | | | AI589007, AI566535, | |
| | | | | | AW272765, AA766315, | |
| | | | | | AW242239, AA279943, | |
| | | | | | AI816094, AI014927, | |
| | | | | | AI038579, AA578848, | |
| | | | | | AI476548, AI354483, | |
| | | | | | AA973322, AA992180, | |
| | | | | | AA172248, AA279942, | |
| | | | | | AI392988, AA327978, | |
| | | | | | AA769228, AA506076, | |
| | | | | | AA301103, AI653752, | |
| | | | | | AI370562, AA343765, | |
| | | | | | N85422, AI540751, | |
| | | | | | AI282882, AA506075, | |
| | | | | | AL137710, and L11316. | |
| HDQGZ78 | 73 | 1091628 | 1-1613 | 15-1627 | AW084116, AI453760, | |
| | | | | | AA412504, AA921849, | |
| | | | | | AW083007, AA412618, | |
| | | | | | W93897, AW419472, | |
| | | | | | AW276980, AW196340, | |
| | | | | | AA516262, AA952969, | |
| | | | | | AI478774, W93857, | |
| | | | | | AI276233, AA084469, | |
| | | | | | AA084475, and AF038388. | |
| HHEMD52 | 74 | 909742 | 1-1605 | 15-1619 | AW341445, and | |
| | | | | | AA885447. | |
| HODFD73 | 75 | 1171995 | 1-684 | 15-698 | AL050332, AF048976, | |
| | | | | | AF050183, AF058790, | |
| | | | | | AF058789, and AB016962. | |
| HIBDE74 | 76 | 1081188 | 1-1496 | 15-1510 | AW440521, AF114028, | |
| | | | | | AI475567, AA448233, | |
| | | | | | AW297752, W93994, | |
| | | | | | AW235968, AA297792, | |
| | | | | | AI802944, AA448377, | |
| | | | | | H81801, H81802, AI864036, | |
| | | | | | AA350909, AA837157, | |
| | | | | | AW015303, and AL035106. | |
| HTAIF22 | 77 | 910040 | 1-452 | 15-466 | Nov 22 2000 3:31:07: and | |
| | | | | | 450AM. | |
| HUVFZ43 | 78 | 910860 | 1-1436 | 15-1450 | AL121363, AI569727, | |
| | | | | | AL121364, AA296414, | |
| | | | | | Z17339, and AA345259. | |
| HNTMB90 | 79 | 910934 | 1-718 | 15-732 | Z99396, AL038837, | |
| | | | | | AL037051, AL036725, | |
| | | | | | AA631969, AL039074, | |
| | | | | | AW392670, AL036418, | |
| | | | | | AL039085, AL039564, | |
| | | | | | AL036858, AL039156, | |
| | | | | | AL039108, AL038509, | |
| | | | | | AL039109, AL039128, | |
| | | | | | AL036924, AL037094, | |
| | | | | | AL039659, AL038531, | |
| | | | | | AL036196, AL039625, | |
| | | | | | AL039648, AL045337, | |
| | | | | | AL036767, AL119497, | |
| | | | | | AL037082, AL037526, | |
| | | | | | AL036190, AL038447, | |
| | | | | | AL119483, AL037639, | |
| | | | | | AW372827, AL039678, | |
| | | | | | AW363220, AL039629, | |
| | | | | | AW384394, AL119457, | |
| | | | | | AL039423, AL036238, | |
| | | | | | AL039150, AL119319, | |
| | | | | | AL040992, AL119324, | |
| | | | | | AL042909, U46350, | |
| | | | | | AL038520, AL119484, | |
| | | | | | AL119391, AL037077, | |
| | | | | | AL119443, AL119522, | |
| | | | | | U46351, AL119355, | |
| | | | | | AL119363, AL037726, | |
| | | | | | U46341, U46347, U46349, | |
| | | | | | AL134533, AL039410, | |
| | | | | | AL038851, AL119341, | |
| | | | | | AL134531, AL119335, | |
| | | | | | AL119418, AL119396, | |
| | | | | | AL039386, AL036998, | |
| | | | | | AL036733, AL119496, | |
| | | | | | AL037615, AL119439, | |
| | | | | | AL036268, AL037085, | |
| | | | | | AL119401, AL119444, | |
| | | | | | AL037205, AL037027, | |
| | | | | | AL037178, AL045353, | |
| | | | | | U46346, AL036679, | |
| | | | | | AL042614, AL036765, | |
| | | | | | AL042965, AL042975, | |
| | | | | | AL134528, AL134538, | |
| | | | | | AL042984, AL036191, | |
| | | | | | AL119399, AL134920, | |
| | | | | | AL042544, U46345, | |
| | | | | | AL036719, AL043003, | |
| | | | | | AL043019, AL042542, | |
| | | | | | AL042551, AL042450, | |
| | | | | | AL043029, AL134542, | |
| | | | | | AL134532, AL037021, | |
| | | | | | AL037054, AL036836, | |
| | | | | | AL036158, AL119464, | |
| | | | | | AL036774, AL036886, | |
| | | | | | AL036999, AL036964, | |
| | | | | | AR066494, AR060234, | |
| | | | | | AR023813, AR064707, | |
| | | | | | A81671, AR069079, | |
| | | | | | AB026436, AR054110, and | |
| | | | | | AR064706. | |
| HMKCH92 | 80 | 910936 | 1-789 | 15-803 | T78768, R13299, R14933, | |
| | | | | | AB003592, D87248, | |
| | | | | | AC018833, AC034192, | |
| | | | | | AC026206, AC026206, | |
| | | | | | AC022381, and AC022381. | |
| HTELV86 | 81 | 910946 | 1-1086 | 15-1100 | AI272244, AA382531, | |
| | | | | | AI809639, U35371, and | |
| | | | | | X99043. | |
| HNTAF23 | 82 | 910947 | 1-239 | 15-253 | AW392670, AL119355, | |
| | | | | | AW372827, U46341, | |
| | | | | | AL119483, AL119319, | |
| | | | | | U46349, AL119457, | |
| | | | | | AL119324, AW384394, | |
| | | | | | AL119497, AW363220, | |
| | | | | | Z99396, AL134920, | |
| | | | | | AL134524, AL119484, | |
| | | | | | AL119363, AL119391, | |
| | | | | | U46350, U46347, U46351, | |
| | | | | | AL119443, AL119444, | |
| | | | | | AI142137, AL119341, | |
| | | | | | AL134538, AL119439, | |
| | | | | | AL119522, AL119396, | |
| | | | | | U46346, AL043029, | |
| | | | | | AL037205, AL134531, | |
| | | | | | AL119335, AL042614, | |
| | | | | | AL119399, AI142139, | |
| | | | | | AL119496, AL134533, | |
| | | | | | AL119418, U46345, | |
| | | | | | AL043011, AL042984, | |
| | | | | | AL043019, AL042544, | |
| | | | | | AL042896, AL043033, | |
| | | | | | AL042965, AL042975, | |
| | | | | | AL042450, AL042542, | |
| | | | | | AL043003, AL119464, | |
| | | | | | AL042551, AB026436, | |
| | | | | | A81671, AR060234, | |
| | | | | | AR054110, AR066494, | |
| | | | | | AR069079, and AR043113. | |
| HELHP01 | 83 | 1137839 | 1-1444 | 15-1458 | AI608791, AA127698, | |
| | | | | | AI161158, AI354544, | |
| | | | | | AI084748, AI858808, | |
| | | | | | AI342497, AA121534, | |
| | | | | | AW167039, AA534215, | |
| | | | | | AW087209, AI688929, | |
| | | | | | AW160657, AW276367, | |
| | | | | | AA187542, AW276379, | |
| | | | | | AW276372, AI208010, | |
| | | | | | AL037531, AI869783, | |
| | | | | | AA864203, AW022809, | |
| | | | | | AW163523, AL042389, | |
| | | | | | N67858, AW014774, | |
| | | | | | AI128491, AW163251, | |
| | | | | | AI142006, AI741015, | |
| | | | | | N71131, W69482, | |
| | | | | | AL039099, AI283271, | |
| | | | | | AI246571, AI580768, | |
| | | | | | AL134219, AA029532, | |
| | | | | | W69483, N70077, | |
| | | | | | AW052086, AI929713, | |
| | | | | | AI354786, AI440409, | |
| | | | | | AI262591, AI479077, | |
| | | | | | AA999933, AI692210, | |
| | | | | | AI591173, AI524321, | |
| | | | | | AI826162, AI815904, | |
| | | | | | AA991277, AW029285, | |
| | | | | | AA315904, AI124609, | |
| | | | | | AI751795, AW135528, | |
| | | | | | AI298570, AW406256, | |
| | | | | | AI950928, AI539728, | |
| | | | | | AA307850, AI338794, | |
| | | | | | AA465027, AI970583, | |
| | | | | | AW156926, AI762457, | |
| | | | | | AA433862, AL041470, | |
| | | | | | AI928845, AA306587, | |
| | | | | | AA180001, AA004466, | |
| | | | | | D51104, AI816418, | |
| | | | | | AW157249, AA610408, | |
| | | | | | AW438710, AW167329, | |
| | | | | | AA082096, AI279257, | |
| | | | | | AW242362, AW162260, | |
| | | | | | AA088541, AI401664, | |
| | | | | | AW157417, AW163512, | |
| | | | | | H22174, AA194754, | |
| | | | | | W46515, AA304425, | |
| | | | | | AW439662, AI003392, | |
| | | | | | AW247199, H22138, | |
| | | | | | AI804527, AW405514, | |
| | | | | | H63206, R46286, H67969, | |
| | | | | | AW439422, AA907456, | |
| | | | | | T26421, AA778397, | |
| | | | | | AI687072, AI815396, | |
| | | | | | AA325006, AI680477, | |
| | | | | | AL042390, AW411448, | |
| | | | | | AA324732, AW104826, | |
| | | | | | AW157458, AA187260, | |
| | | | | | AA083982, AI141702, | |
| | | | | | AI680118, AW162409, | |
| | | | | | AI816045, AW303785, | |
| | | | | | AA312844, AA730294, | |
| | | | | | AW406619, AL041471, | |
| | | | | | AI372525, H80185, T19319, | |
| | | | | | AW162596, M62208, | |
| | | | | | AA009448, H30869, | |
| | | | | | AL121246, H80342, | |
| | | | | | H71158, W01561, | |
| | | | | | AI697194, AW168145, | |
| | | | | | AW162660, AW409733, | |
| | | | | | H63120, AW088214, | |
| | | | | | AA325602, M77906, | |
| | | | | | T19333, AW080823, | |
| | | | | | R86041, W22965, | |
| | | | | | AA808433, R51405, | |
| | | | | | AI560028, AA113043, | |
| | | | | | AW162591, AI538243, | |
| | | | | | AI970740, AW246768, | |
| | | | | | AW022184, AA180847, | |
| | | | | | AA599787, AA434162, | |
| | | | | | H09396, AW161782, | |
| | | | | | AA373486, AW003626, | |
| | | | | | AI672191, AA148746, | |
| | | | | | AW248562, AW090042, | |
| | | | | | U47634, X60786, | |
| | | | | | AL050056, AF035316, | |
| | | | | | X79535, X00734, M15052, | |
| | | | | | J00913, V00389, M11443, | |
| | | | | | M11442, AF184595, | |
| | | | | | AF102890, X07011, | |
| | | | | | U08342, X03369, | |
| | | | | | AF184596, X60784, | |
| | | | | | AF120325, M28730, | |
| | | | | | X04663, AL030996, | |
| | | | | | S57698, X02344, L08013, | |
| | | | | | AB011679, X60785, | |
| | | | | | AF147880, J00316, L06232, | |
| | | | | | J00315, M28732, M28739, | |
| | | | | | AF074422, and A74700. | |
| HTLGH72 | 84 | 1199896 | 1-900 | 15-914 | AA316295, AI018335, | |
| | | | | | AI453623, AI123197, | |
| | | | | | AA947467, AA401192, | |
| | | | | | AI436596, AA749110, | |
| | | | | | F06683, AA442605, | |
| | | | | | AA095581, AI972354, | |
| | | | | | H08256, R55838, AI133156, | |
| | | | | | AI812015, AI334445, | |
| | | | | | AI499621, AI284131, | |
| | | | | | AI537677, AI913452, | |
| | | | | | AI926367, AI174394, | |
| | | | | | AI523806, AI445165, | |
| | | | | | AW149227, AW301409, | |
| | | | | | AI354998, AL119791, | |
| | | | | | AI824576, AW004886, | |
| | | | | | AW161156, AI934035, | |
| | | | | | AI352497, AL135025, | |
| | | | | | AL041150, AI648684, | |
| | | | | | AI312428, AL119863, | |
| | | | | | AL036980, AI699865, | |
| | | | | | AI343059, AI224027, | |
| | | | | | AL040241, AW161579, | |
| | | | | | AW151136, AI133489, | |
| | | | | | AL041772, AI349933, | |
| | | | | | AW163834, AW071417, | |
| | | | | | AI632408, AW148320, | |
| | | | | | AI345608, AI499986, | |
| | | | | | AI280732, AI349967, | |
| | | | | | AI636445, AI499285, | |
| | | | | | AI537244, AI801325, | |
| | | | | | AI281782, AI500061, | |
| | | | | | AI345471, AI873644, | |
| | | | | | AW168485, AI648509, | |
| | | | | | F27788, AI567582, | |
| | | | | | AI432040, AI445990, | |
| | | | | | AI571909, AA640779, | |
| | | | | | AW163823, AI624548, | |
| | | | | | AW235745, AI476109, | |
| | | | | | AI680498, AI478123, | |
| | | | | | AI690751, AW051088, | |
| | | | | | AI620089, AI886753, | |
| | | | | | AI362637, AI500523, | |
| | | | | | AI340603, AI698401, | |
| | | | | | AA225339, AI862144, | |
| | | | | | AW198144, AI433384, | |
| | | | | | AI446373, AI890833, | |
| | | | | | AW102761, AI284517, | |
| | | | | | AI923989, AI521594, | |
| | | | | | AI950892, AW198075, | |
| | | | | | AW168031, AI783504, | |
| | | | | | AI620284, AI863321, | |
| | | | | | AW051258, AW080402, | |
| | | | | | AI628217, AW088903, | |
| | | | | | AW117746, AI637748, | |
| | | | | | AI921248, AI611738, | |
| | | | | | AI275640, AI619502, | |
| | | | | | AI677796, AI680162, | |
| | | | | | AI306613, AW268302, | |
| | | | | | AI802542, AL037030, | |
| | | | | | AI922901, AI282326, | |
| | | | | | AI866770, AA449768, | |
| | | | | | AI250293, AI288305, | |
| | | | | | AA572758, AW118518, | |
| | | | | | AI570807, AI933589, | |
| | | | | | AI635067, AW026882, | |
| | | | | | AI923370, AI627988, | |
| | | | | | AI249962, AL079963, | |
| | | | | | AL038605, AI859880, | |
| | | | | | AI445992, AL134999, | |
| | | | | | AI874166, AW151714, | |
| | | | | | AI569309, AW129230, | |
| | | | | | AI670009, AI433157, | |
| | | | | | AI696626, AI702073, | |
| | | | | | AW087938, AI866573, | |
| | | | | | AW071349, AI684234, | |
| | | | | | AL121286, AI251221, | |
| | | | | | AI539771, AL037454, | |
| | | | | | N33175, AW238730, | |
| | | | | | AI623941, AL037043, | |
| | | | | | AL036274, AI797908, | |
| | | | | | AI500662, R32821, | |
| | | | | | AI888621, AI539028, | |
| | | | | | AI273142, AI633125, | |
| | | | | | AI698391, AI915291, | |
| | | | | | AI678357, AW268251, | |
| | | | | | AI582932, AL036673, | |
| | | | | | AI521476, AI679506, | |
| | | | | | AW079572, AI308032, | |
| | | | | | AI432969, AI521560, | |
| | | | | | AI889189, AI308035, | |
| | | | | | AI284509, AI868204, | |
| | | | | | AL042745, AA493923, | |
| | | | | | AI345253, AW088134, | |
| | | | | | AI783792, AI269862, | |
| | | | | | AI802826, AL048323, | |
| | | | | | AI250369, AI310575, | |
| | | | | | AI344785, AI345677, | |
| | | | | | AI888661, AA494167, | |
| | | | | | AL048340, AW193911, | |
| | | | | | AW268768, AI498579, | |
| | | | | | AI963216, AI340533, | |
| | | | | | AI919107, AI800433, | |
| | | | | | AI537515, AI569583, | |
| | | | | | AI888944, AI886123, | |
| | | | | | W74529, AI524671, | |
| | | | | | AI570966, H89138, | |
| | | | | | AL039086, AI475151, | |
| | | | | | AI358701, AL120853, | |
| | | | | | AL036736, AL121365, | |
| | | | | | AA427700, AI249877, | |
| | | | | | AI251205, AI886181, | |
| | | | | | AI439717, AI538342, | |
| | | | | | AI497733, AI814087, | |
| | | | | | AI251830, AI288285, | |
| | | | | | AW072719, AI869377, | |
| | | | | | AI344935, AW068845, | |
| | | | | | AI687065, AW130930, | |
| | | | | | AI270205, AL036396, | |
| | | | | | AW302965, AI439762, | |
| | | | | | AI955866, AI933785, | |
| | | | | | AI520809, N80094, | |
| | | | | | AW074869, AI554245, | |
| | | | | | AI633419, AW151785, | |
| | | | | | AJ242973, U37150, I48978, | |
| | | | | | AL122098, I89947, I48979, | |
| | | | | | AF113013, AF125948, | |
| | | | | | A08916, A07647, A08913, | |
| | | | | | A03736, A08910, | |
| | | | | | AL110221, AL137459, | |
| | | | | | AF087943, I89931, A08909, | |
| | | | | | AL117585, A74814, | |
| | | | | | AL137294, I49625, | |
| | | | | | AF113019, AL133075, | |
| | | | | | AJ012755, AF104032, | |
| | | | | | AF026816, AL080159, | |
| | | | | | I33392, Y14314, AF146568, | |
| | | | | | AL122093, AL133113, | |
| | | | | | AL122110, AL049430, | |
| | | | | | X98834, AL137271, | |
| | | | | | X84990, AL137463, | |
| | | | | | AL137480, AL122121, | |
| | | | | | A58524, A58523, E03348, | |
| | | | | | AF017437, AF067728, | |
| | | | | | Y11587, AF111849, | |
| | | | | | AF113676, AF090896, | |
| | | | | | AL050393, U42766, | |
| | | | | | AF111112, AR059958, | |
| | | | | | AL117460, E07108, | |
| | | | | | AL133565, S61953, | |
| | | | | | AF097996, AL110196, | |
| | | | | | AL122050, AJ242859, | |
| | | | | | AF090900, AL133016, | |
| | | | | | AF057300, AF057299, | |
| | | | | | AL080060, Y11254, | |
| | | | | | AL050149, AF177401, | |
| | | | | | U35846, AB019565, | |
| | | | | | AL049283, AL133557, | |
| | | | | | AL050277, I00734, | |
| | | | | | AF090901, A77033, | |
| | | | | | A77035, AF079763, | |
| | | | | | AL137538, A93350, | |
| | | | | | AL117457, A45787, | |
| | | | | | AL096744, E00617, | |
| | | | | | E00717, E00778, AF185576, | |
| | | | | | AL133560, A08912, | |
| | | | | | AJ006417, I26207, X72889, | |
| | | | | | AF113689, U67958, | |
| | | | | | AF113699, AL133640, | |
| | | | | | I42402, AF183393, | |
| | | | | | AF113691, AF090903, | |
| | | | | | S68736, U80742, | |
| | | | | | AL117394, AL050138, | |
| | | | | | AL080124, AL133606, | |
| | | | | | AF106862, AL110280, | |
| | | | | | AF113694, A93016, | |
| | | | | | AR038854, AF118064, | |
| | | | | | I09360, A65341, AR000496, | |
| | | | | | U39656, AF210052, | |
| | | | | | AL133568, A12297, | |
| | | | | | AL117435, X93495, | |
| | | | | | AL110222, AL137476, | |
| | | | | | AL137557, AL049382, | |
| | | | | | E02349, AL080137, | |
| | | | | | AF119337, AL137556, | |
| | | | | | Z82022, E08631, AF158248, | |
| | | | | | X63574, AR013797, | |
| | | | | | AL133067, AF118094, | |
| | | | | | AF090943, AL049938, | |
| | | | | | AL137550, AL117583, | |
| | | | | | S78214, AF026124, | |
| | | | | | AF162270, AL050116, | |
| | | | | | AF061943, U72620, | |
| | | | | | AF091084, X82434, | |
| | | | | | AL050024, AL137478, | |
| | | | | | AF132676, AF061836, | |
| | | | | | AL137648, AF017152, | |
| | | | | | Z37987, AL050146, | |
| | | | | | AL117440, AL110225, | |
| | | | | | AL122118, U00763, | |
| | | | | | E02221, X96540, | |
| | | | | | AL122123, AR011880, | |
| | | | | | AL049466, AL122049, | |
| | | | | | I03321, AL137526, | |
| | | | | | AL133093, AF118070, | |
| | | | | | X70685, E15569, | |
| | | | | | AL080127, AL133077, | |
| | | | | | AL133014, AL137527, | |
| | | | | | AF078844, AL133080, | |
| | | | | | AL133081, AJ238278, | |
| | | | | | AF125949, AF113690, | |
| | | | | | Y16645, AL049300, | |
| | | | | | AL049452, AJ000937, | |
| | | | | | AL049314, AF111851, | |
| | | | | | AF153205, U96683, I09499, | |
| | | | | | AL050108, X65873, | |
| | | | | | AF079765, AF003737, | |
| | | | | | AF090934, AF113677, | |
| | | | | | AL049464, AR038969, | |
| | | | | | X87582, E04233, | |
| | | | | | AL137560, L30117, | |
| | | | | | AL133072, AL137521, | |
| | | | | | AF061573, AL137292, | |
| | | | | | AL133104, L19437, | |
| | | | | | AL050172, U58996, | |
| | | | | | AL133098, X92070, | |
| | | | | | L31396, L31397, E08263, | |
| | | | | | E08264, E07361, E05822, | |
| | | | | | Y09972, U78525, U91329, | |
| | | | | | AL133665, AL080074, | |
| | | | | | AL137533, AF067790, | |
| | | | | | AF028823, X62580, | |
| | | | | | Z72491, A90832, M30514, | |
| | | | | | AL023657, E12747, | |
| | | | | | AF081197, U68387, | |
| | | | | | Y07905, AL117432, | |
| | | | | | AF008439, AR020905, | |
| | | | | | AF106827, S79832, E06743, | |
| | | | | | AL122111, I41145, | |
| | | | | | AF022363, AL137523, and | |
| | | | | | AL110197. | |
| HHEND45 | 85 | 1128226 | 1-582 | 15-596 | | |
| HMTAY52 | 86 | 1137641 | 1-2174 | 15-2188 | AI700520, AW149641, | |
| | | | | | AA861402, AW438617, | |
| | | | | | AW136764, AA846335, | |
| | | | | | AI884663, AI076276, | |
| | | | | | H93328, AA813373, | |
| | | | | | AI093740, H02724, | |
| | | | | | AI191231, AA725037, | |
| | | | | | W02044, R96371, | |
| | | | | | AA317716, AW188393, | |
| | | | | | AI422301, AW193480, | |
| | | | | | AA341954, AI863986, | |
| | | | | | AA341953, AA628360, | |
| | | | | | H93832, R96413, | |
| | | | | | AA322251, H62043, | |
| | | | | | AA596074, H90193, | |
| | | | | | R79366, AA128507, | |
| | | | | | R79365, and U61836. | |
| HUCPS03 | 87 | 1158484 | 1-1366 | 15-1380 | AA350185, AI635570, | |
| | | | | | Z45871, AA424391, | |
| | | | | | R48915, AA165465, | |
| | | | | | T77152, T84026, | |
| | | | | | AA299342, T81218, | |
| | | | | | AW303853, AC005585, and | |
| | | | | | AC004997. | |
| HNHNP81 | 88 | 928378 | 1-604 | 15-618 | D51060, C14014, D58283, | |
| | | | | | AA305409, D80253, | |
| | | | | | D80024, D80166, D59619, | |
| | | | | | D80210, D80240, D80366, | |
| | | | | | AA514186, C14389, | |
| | | | | | D80043, D81030, D80133, | |
| | | | | | D80247, D59859, D80212, | |
| | | | | | D51799, D80164, D80219, | |
| | | | | | D51423, D80022, D80391, | |
| | | | | | D59787, D80195, D80188, | |
| | | | | | D80248, C14331, D59502, | |
| | | | | | D59467, D57483, D59275, | |
| | | | | | D59610, D80227, D81026, | |
| | | | | | D50995, D80196, D80439, | |
| | | | | | D80251, D80269, D59889, | |
| | | | | | D51022, D50979, D80268, | |
| | | | | | D80522, C15076, D59927, | |
| | | | | | AA305578, D80038, | |
| | | | | | D80193, D80045, D80241, | |
| | | | | | AA514188, AW360811, | |
| | | | | | D80378, AW177440, | |
| | | | | | D80302, C05695, C14429, | |
| | | | | | AW178893, AW377671, | |
| | | | | | AW375405, D80157, | |
| | | | | | T03269, C75259, | |
| | | | | | AW178906, AW179328, | |
| | | | | | AW366296, AW360844, | |
| | | | | | AW360817, D59373, | |
| | | | | | AW375406, D51103, | |
| | | | | | AW378534, AW179332, | |
| | | | | | AW377672, AW179023, | |
| | | | | | AW178905, D51759, | |
| | | | | | AW360841, AW378532, | |
| | | | | | D58253, AW177731, | |
| | | | | | AW177501, AW177511, | |
| | | | | | D80132, D80134, | |
| | | | | | AW352171, AW377676, | |
| | | | | | AW352170, AW178907, | |
| | | | | | AW378528, AW178762, | |
| | | | | | AW179019, AW179024, | |
| | | | | | D51250, AW176467, | |
| | | | | | AW178983, AW177505, | |
| | | | | | D81111, D59653, | |
| | | | | | AW179020, AW178775, | |
| | | | | | AW367967, AW369651, | |
| | | | | | AW178909, T48593, | |
| | | | | | AW177456, AW179329, | |
| | | | | | AW178980, AW178914, | |
| | | | | | AW177733, AW178908, | |
| | | | | | AW178754, AW179018, | |
| | | | | | C06015, AW352158, | |
| | | | | | AW352117, D80949, | |
| | | | | | AW178774, D59695, | |
| | | | | | D52291, D45260, | |
| | | | | | AW352120, D59627, | |
| | | | | | D51079, AW179004, | |
| | | | | | AW179012, AW378525, | |
| | | | | | AW352163, F13647, | |
| | | | | | AW360834, T11417, | |
| | | | | | D80064, Z21582, D80168, | |
| | | | | | C14298, AW378543, | |
| | | | | | AW352174, D80258, | |
| | | | | | AW177728, H67854, | |
| | | | | | C14227, AW179009, | |
| | | | | | AI525923, AW367950, | |
| | | | | | AW178911, AW177722, | |
| | | | | | D59503, AI910186, | |
| | | | | | AW378540, C03092, | |
| | | | | | H67866, AA809122, | |
| | | | | | D51221, AW178781, | |
| | | | | | D58101, AI905856, D58246, | |
| | | | | | AW177508, C14407, | |
| | | | | | D80228, AI525917, C14077, | |
| | | | | | AW178986, AW177497, | |
| | | | | | T03116, AI535686, | |
| | | | | | AI535850, D59317, D51213, | |
| | | | | | D80014, D59474, | |
| | | | | | AW177734, AI525920, | |
| | | | | | D45273, AW177723, | |
| | | | | | C14973, C14344, | |
| | | | | | AW378533, AA514184, | |
| | | | | | D59551, C14957, AI525215, | |
| | | | | | D60010, AI525235, D60214, | |
| | | | | | AI525227, C14046, | |
| | | | | | AI557774, AI557751, | |
| | | | | | AI525912, T03048, | |
| | | | | | AI525925, D51097, | |
| | | | | | AI525242, AA285331, | |
| | | | | | AW378542, AI525222, | |
| | | | | | AW378539, Z30160, | |
| | | | | | C16955, C05763, Z33452, | |
| | | | | | T02974, D51053, | |
| | | | | | AW360855, H67858, | |
| | | | | | AI525237, C04682, D50981, | |
| | | | | | T02868, C13958, AI525928, | |
| | | | | | D80314, AI525238, A62298, | |
| | | | | | AB028859, AR018138, | |
| | | | | | AJ132110, A62300, | |
| | | | | | AR008278, A84916, | |
| | | | | | AF058696, A82595, | |
| | | | | | AR060385, AB002449, | |
| | | | | | D89785, X67155, Y17188, | |
| | | | | | A94995, D26022, Y12724, | |
| | | | | | A25909, A67220, A78862, | |
| | | | | | D34614, AR008443, I50126, | |
| | | | | | I50132, I50128, I50133, | |
| | | | | | D88547, AR066488, | |
| | | | | | AR016514, AR060138, | |
| | | | | | A45456, A26615, | |
| | | | | | AR052274, X82626, | |
| | | | | | Y09669, A43192, A43190, | |
| | | | | | AR038669, AR066487, | |
| | | | | | A30438, I14842, AR025207, | |
| | | | | | AR054175, D50010, | |
| | | | | | Y17187, AR066490, | |
| | | | | | AR008277, AR008281, | |
| | | | | | A63261, I18367, AR008408, | |
| | | | | | AR062872, A70867, | |
| | | | | | AR016691, AR016690, | |
| | | | | | U46128, D13509, A64136, | |
| | | | | | A68321, AR060133, | |
| | | | | | AB012117, 179511, X68127, | |
| | | | | | U79457, AF123263, | |
| | | | | | AR032065, Z82022, | |
| | | | | | A63887, and AR008382. | |
| HFIDL68 | 89 | 928475 | 1-516 | 15-530 | AI375172. | |
| HTLAB16 | 90 | 1144562 | 1-1215 | 15-1229 | AI743990, AI589677, | |
| | | | | | AW117688, AA418209, | |
| | | | | | AA293017, AA393552, | |
| | | | | | AI671530, AA969969, | |
| | | | | | H05646, AA868456, | |
| | | | | | AA836313, R34733, | |
| | | | | | AW263156, AW206863, | |
| | | | | | R72891, H06920, AI638884, | |
| | | | | | Z38689, AA280165, | |
| | | | | | H05647, AI424304, | |
| | | | | | AI399693, AI685889, | |
| | | | | | Z42496, R49606, | |
| | | | | | AA552211, AW237268, | |
| | | | | | AA400796, AA621751, | |
| | | | | | AI468780, AA566051, | |
| | | | | | D60125, AW237328, | |
| | | | | | AA651719, AA280537, | |
| | | | | | AA628052, AI621125, | |
| | | | | | AI365113, AI590631, | |
| | | | | | R73367, and AW370133. | |
| HOEEU57 | 91 | 1158765 | 1-467 | 15-481 | AI831578, AA862453, | |
| | | | | | AI276148, AI925229, | |
| | | | | | AI344497, AI343937, | |
| | | | | | AI923983, AI299183, | |
| | | | | | AI086925, AW387023, | |
| | | | | | AW387014, AW386986, | |
| | | | | | AA333257, AI991662, | |
| | | | | | AW374923, AI093616, | |
| | | | | | W02289, AA528079, | |
| | | | | | AA455633, R58057, | |
| | | | | | AA767913, R21305, and | |
| | | | | | R18269. | |
| HNHCP79 | 92 | 565781 | 1-288 | 15-302 | | |
| HHSDL85 | 93 | 942246 | 1-760 | 15-774 | R12427. | |
| HWADD57 | 94 | 943039 | 1-996 | 15-1010 | AA320236, AC011492, and | |
| | | | | | AC011492. | |
| HFKKN77 | 95 | 943757 | 1-719 | 15-733 | | |
| HBGMZ39 | 96 | 947112 | 1-588 | 15-602 | AI820661, AI791493, | |
| | | | | | AA989356, AI791282, | |
| | | | | | AI732537, AI792053, | |
| | | | | | AW207804, R22360, | |
| | | | | | R72427, AA505927, | |
| | | | | | R22019, R72474, | |
| | | | | | AC008537, AC008537, | |
| | | | | | AC008537, AC019337, | |
| | | | | | AC019337, and AC019337. | |
| HTTCB17 | 97 | 1180942 | 1-2158 | 15-2172 | AW070938, AA984061, | |
| | | | | | AL041636, AL043672, | |
| | | | | | AI499419, AA533251, | |
| | | | | | AI820049, AA236580, | |
| | | | | | AA234444, T64870, | |
| | | | | | AA761405, AA688276, | |
| | | | | | H58691, AL042008, | |
| | | | | | AA421748, R58865, | |
| | | | | | AL042032, AA157675, | |
| | | | | | T40471, AA521150, | |
| | | | | | H23351, AF012373, | |
| | | | | | N53133, T67438, | |
| | | | | | AA284019, AL043673, | |
| | | | | | AA224471, T39198, | |
| | | | | | AA829259, T99670, | |
| | | | | | H23240, AA215781, | |
| | | | | | AA285153, AI039274, | |
| | | | | | AA056347, AI025833, | |
| | | | | | AI698363, T99070, | |
| | | | | | AL046440, AL046465, | |
| | | | | | T69471, AA652360, | |
| | | | | | AI090248, AW090185, | |
| | | | | | AW265609, AI220192, | |
| | | | | | AA626470, AA428563, | |
| | | | | | X84692, AC007172, and | |
| | | | | | U07155. | |
| HEQAP17 | 98 | 949358 | 1-807 | 15-821 | AI131555, AI769466, | |
| | | | | | AA215577, AW190975, | |
| | | | | | AA258335, AA258499, | |
| | | | | | AL044652, S63848, | |
| | | | | | Y17793, and A49045. | |
| H2LAD53 | 99 | 952181 | 1-348 | 15-362 | AA313893, AA332909, | |
| | | | | | R32396, and N57638. | |
| HAMFD12 | 100 | 1149676 | 1-3206 | 15-3220 | AI869315, AI795815. | |
| | | | | | AA147088, AI421559, | |
| | | | | | AW131473, AA307132, | |
| | | | | | AI860630, AI859194, | |
| | | | | | AA554706, AA779596, | |
| | | | | | AI817963, AW131732, | |
| | | | | | AI131006, AI131235, | |
| | | | | | AI298506, AI903044, | |
| | | | | | AW360926, AA132115, | |
| | | | | | M79142, AW085550, | |
| | | | | | R32144, AA996236, | |
| | | | | | AA827499, AA325898, | |
| | | | | | AI864171, AI810869, | |
| | | | | | H19200, AW083177, | |
| | | | | | AI279054, AI683076, | |
| | | | | | R49059, R32143, AI682910, | |
| | | | | | N48917, AA322186, | |
| | | | | | W07596, T32822, | |
| | | | | | AI951120, AA902240, | |
| | | | | | AI909782, AI302680, | |
| | | | | | H03637, AA310842, | |
| | | | | | AA031941, F06992, | |
| | | | | | AA555053, AI909807, | |
| | | | | | AA557656, AI874400, | |
| | | | | | AA319725, AA147145, | |
| | | | | | AW020184, AA318860, | |
| | | | | | AA327450, AI935791, | |
| | | | | | AI702044, AI913289, | |
| | | | | | AA324945, R49185, | |
| | | | | | AA132349, AI948650, | |
| | | | | | R33114, F03268, AI419183, | |
| | | | | | N46415, T29712, AI940337, | |
| | | | | | N20886, H19201, AI539258, | |
| | | | | | AA904255, D58578, | |
| | | | | | AI356503, AA322799, | |
| | | | | | AA348452, AA348337, | |
| | | | | | M86105, R62224, | |
| | | | | | AI636387, AW166586, | |
| | | | | | R33262, R34655, | |
| | | | | | AA375538, R64601, | |
| | | | | | AW016275, AA581451, | |
| | | | | | AA357950, N78707, | |
| | | | | | AI915762, AI540261, | |
| | | | | | T12586, AA985516, | |
| | | | | | AW169409, AL118620, | |
| | | | | | H03636, R21586, | |
| | | | | | AA319821, AI962093, | |
| | | | | | T12578, L07924, L07925, | |
| | | | | | U14417, AC000395, and | |
| | | | | | AW515881. | |
| HE2SY09 | 101 | 1186416 | 1-765 | 15-779 | AW249044, AI929457, | |
| | | | | | AL042867, X14971, | |
| | | | | | AB020706, and AC006942. | |
| HWLLB11 | 102 | 954849 | 1-731 | 15-745 | AI745636, and AA102414. | |
| HNTEF53 | 103 | 954852 | 1-2342 | 15-2356 | AA557324, AI655577, | |
| | | | | | AI696732, AI923200, | |
| | | | | | AA863360, AW262723, | |
| | | | | | AI697332, AW275990, | |
| | | | | | AI436648, AW276183, | |
| | | | | | R56515, AI362521, R53456, | |
| | | | | | R53457, D62878, | |
| | | | | | AA337301, AA652746, | |
| | | | | | AW264444, R56123, | |
| | | | | | AA319338, D79346, | |
| | | | | | D79250, N56346, | |
| | | | | | AA886832, and AL138223. | |
| HNTND64 | 104 | 954871 | 1-392 | 15-406 | AC025090, and AC025090. | |
| HFPFA83 | 105 | 955614 | 1-723 | 15-737 | C14389, C15076, D59467, | |
| | | | | | D58283, D50979, D80522, | |
| | | | | | D80164, D80166, D80195, | |
| | | | | | D80043, D80227, D81030, | |
| | | | | | D59275, D59502, D80188, | |
| | | | | | D59859, D80022, C14331, | |
| | | | | | D51423, D59619, D80210, | |
| | | | | | D51799, D80391, D80240, | |
| | | | | | D80253, D80038, D80269, | |
| | | | | | D59787, D80193, D59610, | |
| | | | | | D80212, D80196, D80219, | |
| | | | | | D81026, D59927, D57483, | |
| | | | | | D80378, AW177440, | |
| | | | | | D80366, D80251, | |
| | | | | | AA305409, AA305578, | |
| | | | | | D59889, D50995, D80024, | |
| | | | | | D80241, D51022, D80045, | |
| | | | | | C14429, D51060, C75259, | |
| | | | | | T03269, AW178893, | |
| | | | | | AW179328, AA514188, | |
| | | | | | AW378532, D80248, | |
| | | | | | C14014, AW377671, | |
| | | | | | D51250, AW369651, | |
| | | | | | AW178762, AW178775, | |
| | | | | | AW177501, D80134, | |
| | | | | | AW177511, AA514186, | |
| | | | | | D80133, AW176467, | |
| | | | | | D58253, AW360811, | |
| | | | | | AW352117, C05695, | |
| | | | | | AW375405, AW352158, | |
| | | | | | D80268, AI910186, D80132, | |
| | | | | | AW366296, AW178906, | |
| | | | | | AW360844, AW360817, | |
| | | | | | AW375406, AW378534, | |
| | | | | | AW179332, AW377672, | |
| | | | | | AW179023, AW178905, | |
| | | | | | D80302, D59627, AI905856, | |
| | | | | | AW378540, AW352171, | |
| | | | | | D80258, D80439, | |
| | | | | | AW377676, AW352170, | |
| | | | | | AW177731, AW178907, | |
| | | | | | AW179019, AW179024, | |
| | | | | | D59373, D80247, | |
| | | | | | AW177505, AW179020, | |
| | | | | | AW360841, AW178909, | |
| | | | | | AW177456, AW179329, | |
| | | | | | AW178980, AW177733, | |
| | | | | | AW378528, AW178908, | |
| | | | | | AW178754, AW179018, | |
| | | | | | AW352174, Z21582, | |
| | | | | | AW360834, D51103, | |
| | | | | | AW179004, AW179012, | |
| | | | | | C06015, AW178914, | |
| | | | | | AW378525, AW367967, | |
| | | | | | D80157, AW177722, | |
| | | | | | D51759, AW177728, | |
| | | | | | AW179009, AA285331, | |
| | | | | | AW178774, AW178911, | |
| | | | | | D51097, AW378543, | |
| | | | | | AW352163, D58101, | |
| | | | | | D80064, D58246, D80014, | |
| | | | | | D59503, AW178983, | |
| | | | | | AW352120, AW178781, | |
| | | | | | T48593, AI535850, | |
| | | | | | AW177723, T11417, | |
| | | | | | D59653, AA809122, | |
| | | | | | AW177508, D45260, | |
| | | | | | D59317, C14975, | |
| | | | | | AW378533, AW367950, | |
| | | | | | F13647, D81111, H67854, | |
| | | | | | C03092, C14227, H67866, | |
| | | | | | AI557774, AI525923, | |
| | | | | | AW177497, T02974, | |
| | | | | | AI557751, AW178986, | |
| | | | | | T03116, C14298, D45273, | |
| | | | | | D52291, AW177734, | |
| | | | | | D59474, AI525917, | |
| | | | | | AI525227, D59695, D60010, | |
| | | | | | C14973, AI535961, C14344, | |
| | | | | | C14407, AI535686, C14957, | |
| | | | | | D51221, D59551, AI525920, | |
| | | | | | AA514184, AI525242, | |
| | | | | | D60214, T03048, C14046, | |
| | | | | | AI525912, AI525235, | |
| | | | | | C16955, AI525925, | |
| | | | | | AI525222, D80168, | |
| | | | | | AW378542, AW378539, | |
| | | | | | AI525215, AI525237, | |
| | | | | | C05763, Z33452, AI525928, | |
| | | | | | AW360855, T02868, | |
| | | | | | D51213, D31458, H67858, | |
| | | | | | AR018138, AJ132110, | |
| | | | | | A84916, A62300, A62298, | |
| | | | | | AR008278, AF058696, | |
| | | | | | AB028859, X67155, | |
| | | | | | Y17188, D26022, A25909, | |
| | | | | | A67220, D89785, A78862, | |
| | | | | | D34614, D88547, I82448, | |
| | | | | | Y12724, X82626, | |
| | | | | | AR025207, AR016808, | |
| | | | | | A82595, AR060385, | |
| | | | | | A94995, AB002449, | |
| | | | | | AR008443, AB012117, | |
| | | | | | I50126, I50132, I50128, | |
| | | | | | I50133, AR066488, | |
| | | | | | AR016514, AR060138, | |
| | | | | | A45456, A26615, | |
| | | | | | AR052274, A85396, | |
| | | | | | AR066482, A44171, | |
| | | | | | A85477, I19525, A86792, | |
| | | | | | Y09669, A43192, A43190, | |
| | | | | | AR038669, AR066490, | |
| | | | | | U87250, AR066487, | |
| | | | | | X93549, I14842, A30438, | |
| | | | | | I18367, D88507, AR054175, | |
| | | | | | D50010, Y17187, A63261, | |
| | | | | | AR008277, AR008281, | |
| | | | | | AR008408, AR062872, | |
| | | | | | A70867, AR016691, | |
| | | | | | AR016690, U46128, | |
| | | | | | D13509, 179511, A64136, | |
| | | | | | A68321, AR060133, | |
| | | | | | X68127, AF135125, | |
| | | | | | U79457, AF123263, | |
| | | | | | AB023656, AR032065, | |
| | | | | | AB033111, X93535, and | |
| | | | | | AR008382. | |
| HHAWC08 | 106 | 957942 | 1-1870 | 15-1884 | AI860000, AI984180, | |
| | | | | | AI052115, AW027098, | |
| | | | | | AA507892, AI269682, | |
| | | | | | AI860186, AA910656, | |
| | | | | | AA911665, AI122607, | |
| | | | | | AI982553, AI492064, | |
| | | | | | AI148135, W56156, | |
| | | | | | W60937, AA974459, | |
| | | | | | AI419847, AA009421, | |
| | | | | | N28887, AI673827, | |
| | | | | | AI277360, AA740276, | |
| | | | | | AA778158, AW250214, | |
| | | | | | AA456771, AI034295, | |
| | | | | | N35234, AW170157, | |
| | | | | | N30305, AW247011, | |
| | | | | | AW026104, H99254, | |
| | | | | | AA654123, AA830800, | |
| | | | | | AI141374, AI074187, | |
| | | | | | W31386, AA524317, | |
| | | | | | AI261816, AW403968, | |
| | | | | | AA846516, N39743, | |
| | | | | | AA480954, AI280981, | |
| | | | | | W60872, AW073283, | |
| | | | | | AA761349, AA683175, | |
| | | | | | AI207047, AW236672, | |
| | | | | | AW389139, AA009725, | |
| | | | | | AW058117, AI073671, | |
| | | | | | AI092406, AI085232, | |
| | | | | | AI188288, AA113312, | |
| | | | | | W15516, AA653970, | |
| | | | | | AW352169, N95282, | |
| | | | | | AA551600, W86394, | |
| | | | | | AI084709, N78792, | |
| | | | | | AI475205, N42029, N55379, | |
| | | | | | AW001694, AI355933, | |
| | | | | | AA181712, AA004431, | |
| | | | | | N44897, H94052, | |
| | | | | | AA699746, T48085, | |
| | | | | | AA730615, AA112533, | |
| | | | | | AA306422, AA342623, | |
| | | | | | R38707, H80310, W38668, | |
| | | | | | H06714, T51462, | |
| | | | | | AW375770, H06763, | |
| | | | | | AA302273, F13201, | |
| | | | | | AA033586, H81887, | |
| | | | | | W86393, AA687134, | |
| | | | | | AI269924, AI933743, | |
| | | | | | R89868, AA033585, | |
| | | | | | AI863793, AA315202, | |
| | | | | | R30828, AA772763, | |
| | | | | | AA678198, AW375790, | |
| | | | | | F10804, AW078473, | |
| | | | | | N26380, H80311, AI159939, | |
| | | | | | AI383032, AI300606, | |
| | | | | | AI027171, AA310599, | |
| | | | | | AA887439, AW403264, | |
| | | | | | T75396, AA091936, | |
| | | | | | R89830, N41533, | |
| | | | | | AA810312, N77721, | |
| | | | | | N58353, AI768718, R06623, | |
| | | | | | W37176, H94132, R06681, | |
| | | | | | AW449471, AA026195, | |
| | | | | | AA026267, W24414, | |
| | | | | | AA936706, AI033915, | |
| | | | | | H81888, W07220, | |
| | | | | | AA854111, AA826955, | |
| | | | | | R79020, N43834, | |
| | | | | | AW388723, N77385, | |
| | | | | | N25010, AA879094, | |
| | | | | | AA322203, AR009648, | |
| | | | | | AL096870, AL096870, and | |
| | | | | | AL096870. | |
| HBWBF71 | 107 | 1189778 | 1-582 | 15-596 | AA954402, AA095359, | |
| | | | | | N88601, AA247964, | |
| | | | | | N84855, N83168, | |
| | | | | | AA096046, H58760, | |
| | | | | | N83991, N88782, N89520, | |
| | | | | | N83993, AA247827, | |
| | | | | | N83992, N84048, N84718, | |
| | | | | | AA095641, AA096066, | |
| | | | | | N86694, N84830, N55698, | |
| | | | | | AA471338, N84712, | |
| | | | | | N88518, N84829, N87989, | |
| | | | | | N87898, S78798, | |
| | | | | | AF103726, AF039698, | |
| | | | | | AF102850, U48696, | |
| | | | | | AR066487, AF045432, | |
| | | | | | AF032922, U39066, and | |
| | | | | | AJ243486. | |
| HTLIT03 | 108 | 1152266 | -1254 | 15-1268 | AA886893, AA862723, | |
| | | | | | AA470745, AA992987, | |
| | | | | | AA928557, AI913313, | |
| | | | | | AI073998, T81075, | |
| | | | | | AI277238, T86154, | |
| | | | | | AI821002, AI821291, | |
| | | | | | T47170, C00316, and | |
| | | | | | AC004531. | |
| HSLFH12 | 109 | 970661 | 1-418 | 15-432 | | |
| HE8NI24 | 110 | 971296 | 1-737 | 15-751 | AA883367, AA332611, | |
| | | | | | AA732890, AI283442, | |
| | | | | | AI673342, AI631153, | |
| | | | | | AI200800, AI910962, | |
| | | | | | T11417, D80258, D59503, | |
| | | | | | D80014, D81111, C14227, | |
| | | | | | D80064, AI557751, D58246, | |
| | | | | | C06015, AA514184, | |
| | | | | | AI535959, AW178893, | |
| | | | | | AW178907, AW375405, | |
| | | | | | AW177440, AI535686, | |
| | | | | | AW360834, AW178908, | |
| | | | | | AW360811, D80314, | |
| | | | | | AA809122, D80251, | |
| | | | | | D80253, C03092, D80247, | |
| | | | | | D80043, AA285331, | |
| | | | | | AW176467, C14389, | |
| | | | | | AW179328, T48593, | |
| | | | | | AW375406, D80439, | |
| | | | | | AW378534, AW179332, | |
| | | | | | D58283, AW377672, | |
| | | | | | AW179023, AW178905, | |
| | | | | | D59859, D80022, C14331, | |
| | | | | | D80166, AW177731, | |
| | | | | | D80195, AA305578, | |
| | | | | | D80193, D59927, T03269, | |
| | | | | | D59467, D51423, D59619, | |
| | | | | | AW378528, D80210, | |
| | | | | | AW178906, D51799, | |
| | | | | | D80391, D80164, D59275, | |
| | | | | | AW178762, D80240, | |
| | | | | | D80038, AW179019, | |
| | | | | | D59787, D80227, | |
| | | | | | AW378533, D59502, | |
| | | | | | AA305409, AW378532, | |
| | | | | | F13647, D45260, | |
| | | | | | AW178914, AW378542, | |
| | | | | | AW360855, AW377676, | |
| | | | | | I50126, I50132, I50128, | |
| | | | | | I50133, AF123263, A70867, | |
| | | | | | D88547, AR062872, | |
| | | | | | AR066488, AR016514, | |
| | | | | | A62300, D50010, X82626, | |
| | | | | | AR066487, Y17187, | |
| | | | | | AR060138, A84916, | |
| | | | | | A45456, A67220, D89785, | |
| | | | | | A62298, Y09669, Y17188, | |
| | | | | | AB028859, A82595, | |
| | | | | | A78862, D34614, A94995, | |
| | | | | | D26022, AR060385, | |
| | | | | | A30438, AJ132110, | |
| | | | | | AR018138, A26615, | |
| | | | | | AR052274, A43192, | |
| | | | | | AR008278, X67155, | |
| | | | | | Y12724, A63261, A43190, | |
| | | | | | AR038669, AF058696, | |
| | | | | | A25909, X68127, | |
| | | | | | AR008443, AB002449, | |
| | | | | | AR025207, AR016691, | |
| | | | | | AR016690, and U46128. | |
| HMTAX31 | 111 | 1154339 | 1-896 | 15-910 | AA410486, AA374753, | |
| | | | | | AA411633, AW385663, | |
| | | | | | AA625487, AA256096, | |
| | | | | | AA411671, N36626, | |
| | | | | | AW188661, AA406582, | |
| | | | | | AA847680, N25994, | |
| | | | | | AW167272, AW151243, | |
| | | | | | AA621715, AA345748, | |
| | | | | | AA827049, AA284022, | |
| | | | | | AA815315, AI829183, | |
| | | | | | AI290229, R70442, | |
| | | | | | AI040507, H42445, | |
| | | | | | AI818989, AI040765, | |
| | | | | | AA812382, AI636434, | |
| | | | | | AI015551, AW167634, | |
| | | | | | AI085194, AA983613, | |
| | | | | | AA406387, AA484968, | |
| | | | | | AI278749, H82446, | |
| | | | | | AI342313, AA769207, | |
| | | | | | AI283824, AA911296, | |
| | | | | | R60575, T53444, | |
| | | | | | AA463739, AI128463, | |
| | | | | | AI126964, AI655254, | |
| | | | | | AA872115, AA410304, | |
| | | | | | T30540, AA528102, | |
| | | | | | AA985260, and H42417. | |
| HE8UY87 | 112 | 1171975 | 1-1017 | 15-1031 | AA488339, AA332909, | |
| | | | | | R84768, AA015949, | |
| | | | | | AA313893, R32396, | |
| | | | | | R32397, and N57638. | |
| HTPDV62 | 113 | 1138729 | 1-902 | 15-916 | AI183902, AA683089, | |
| | | | | | AA617873, AA428773, | |
| | | | | | AA371747, AA302461, | |
| | | | | | AA490902, AA769215, | |
| | | | | | AW001581, AI371135, | |
| | | | | | AA541648, AI369827, | |
| | | | | | AI190177, AI141079, | |
| | | | | | AI245438, AI095638, | |
| | | | | | AW007486, AA888067, | |
| | | | | | AA534074, AI798016, | |
| | | | | | AA632013, AI554292, | |
| | | | | | AI422715, AW170631, | |
| | | | | | AI003005, AJ818273, | |
| | | | | | AA299236, AI356047, | |
| | | | | | AI215137, AA126607, | |
| | | | | | W58692, AW182892, | |
| | | | | | AW006997, R54752, | |
| | | | | | AI971642, AA652728, | |
| | | | | | AA700953, AA594060, | |
| | | | | | AI332799, AI991239, | |
| | | | | | AA464316, AA643082, | |
| | | | | | AA287161, AI690764, | |
| | | | | | AI184848, AA534625, | |
| | | | | | AA482551, AW275871, | |
| | | | | | W73756, AA482406, | |
| | | | | | AI312662, AW083880, | |
| | | | | | AA767390, AI091265, | |
| | | | | | AA128033, AI499037, | |
| | | | | | AA029784, AA737008, | |
| | | | | | AI291962, AA524858, | |
| | | | | | AA069805, AA305086, | |
| | | | | | AW173571, AI590872, | |
| | | | | | AI291963, AW269677, | |
| | | | | | AW296379, AI497938, | |
| | | | | | AI092881, AA102025, | |
| | | | | | AA642110, AA765044, | |
| | | | | | H56621, AI671631, | |
| | | | | | AI200177, AI348340, | |
| | | | | | AA887225, AI573191, | |
| | | | | | AA470747, AA491087, | |
| | | | | | AI038522, AA609354, | |
| | | | | | AA485738, AA284500, | |
| | | | | | AI302373, AA806051, | |
| | | | | | AI358650, H19929, | |
| | | | | | AA829537, AA286924, | |
| | | | | | AA937034, C00792, | |
| | | | | | AA723098, AA594909, | |
| | | | | | AI141128, N66142, | |
| | | | | | AI833016, AW328470, | |
| | | | | | AA128009, AA523296, | |
| | | | | | AA808375, AI199216, | |
| | | | | | AA761304, AA953934, | |
| | | | | | AA425912, AI028399, | |
| | | | | | AI568372, AI202858, | |
| | | | | | W61335, AA641528, | |
| | | | | | AI863193, AI347365, | |
| | | | | | AW170380, AA974521, | |
| | | | | | N31038, AA706349, | |
| | | | | | W58693, W76033, | |
| | | | | | AA306100, AA838347, | |
| | | | | | AI750639, N20116, T08092, | |
| | | | | | AI750622, AA151694, | |
| | | | | | T52641, AI272226, | |
| | | | | | AA746219, AI199802, | |
| | | | | | AA399424, AA369769, | |
| | | | | | U66895, L76200, and | |
| | | | | | A11042. | |
| HMUBV12 | 114 | 1227616 | 1-1816 | 15-1830 | AI377407, AI591053, | |
| | | | | | AI140794, AA085250, | |
| | | | | | AA085176, AA568840, | |
| | | | | | AW059669, AF036035, | |
| | | | | | AF040710, U90094, and | |
| | | | | | U73167. | |
| HMIAH32 | 115 | 1171989 | 1-701 | 15-715 | AA890211, AA236800, | |
| | | | | | AI018543, W15550, | |
| | | | | | AA815190, AI263837, | |
| | | | | | AI250936, AA709401, | |
| | | | | | AA236846, AI383379, | |
| | | | | | AA689421, and D87467. | |
| HSIDX67 | 116 | 1228968 | 1-1393 | 15-1407 | AI634902, AI632135, | |
| | | | | | AI990924, AA242743, | |
| | | | | | AW169040, AA242764, | |
| | | | | | AW138927, AI184821, | |
| | | | | | AI200421, AI202175, | |
| | | | | | AW196380, AA828925, | |
| | | | | | AW183069, AI086348, | |
| | | | | | AA778034, AA580419, | |
| | | | | | AI350207, AI949886, | |
| | | | | | AW275112, AI871551, | |
| | | | | | AA927997, AI381743, | |
| | | | | | AI961077, AA778076, | |
| | | | | | AA453300, AA453544, | |
| | | | | | AA167098, AL046926, | |
| | | | | | AA775150, N99406, | |
| | | | | | AA452417, AI890702, | |
| | | | | | AA166911, D14533, | |
| | | | | | U10347, X74351, S74024, | |
| | | | | | U16815, U10345, U10346, | |
| | | | | | U10343, U10344, X74349, | |
| | | | | | X74345, and Z64286. | |
| HMTAV95 | 117 | 614936 | 1-395 | 15-409 | AB023187, AL137000, | |
| | | | | | AL137000, and AL137000. | |
| HCE3W04 | 118 | 1206659 | 1-2100 | 15-2114 | AI677902, AI338780, | |
| | | | | | AI684570, AI928887, | |
| | | | | | AW136644, AW264299, | |
| | | | | | AI652923, AI089627, | |
| | | | | | AI298483, AI372875, | |
| | | | | | AA463846, AI141311, | |
| | | | | | AW204313, AW129570, | |
| | | | | | AI374899, AW134722, | |
| | | | | | AW305132, AI366527, | |
| | | | | | AA463333, U47343, | |
| | | | | | AA031465, AI654427, | |
| | | | | | AW205086, W26816, | |
| | | | | | AI217285, D81166, | |
| | | | | | AA906309, AI382756, | |
| | | | | | AA031486, D80712, | |
| | | | | | AA054522, AA325176, | |
| | | | | | AA884159, AA323357, and | |
| | | | | | AA247154. | |
| HMVAC92 | 119 | 731732 | 1-454 | 15-468 | C18294, AA115838, | |
| | | | | | W76458, T32095, T30710, | |
| | | | | | AA378552, AW360837, | |
| | | | | | R08104, W23225, T35980, | |
| | | | | | N45490, AI554624, T35790, | |
| | | | | | AI313133, T84898, | |
| | | | | | AW391980, Z20579, | |
| | | | | | AA357067, T35190, | |
| | | | | | AA310762, AA328222, | |
| | | | | | R15571, AI205283, | |
| | | | | | AA035103, AA448769, | |
| | | | | | AA214347, W38702, | |
| | | | | | N56257, AA116099, | |
| | | | | | AW401574, AW411042, | |
| | | | | | AA371686, AA452303, | |
| | | | | | AI570120, AA613412, | |
| | | | | | W61124, AA093588, | |
| | | | | | T63232, AW368742, | |
| | | | | | AA868496, AW338692, | |
| | | | | | AW167217, AI954547, | |
| | | | | | AI955639, AA079294, | |
| | | | | | AA478499, W24470, | |
| | | | | | R70678, AA657656, | |
| | | | | | AA166897, AA453225, | |
| | | | | | AA341741, AI697147, | |
| | | | | | T16000, AI921707, | |
| | | | | | AA894909, AA551115, | |
| | | | | | AF128527, AF126181, | |
| | | | | | AF128528, U92544, | |
| | | | | | Z98046, AB029037, and | |
| | | | | | A75460. | |
| HE8OU68 | 120 | 1086802 | 1-657 | 15-671 | AA446069, AA429913, | |
| | | | | | AA121710, AW104301, | |
| | | | | | F07861, and AB002349. | |
| HMUBI80 | 121 | 1206766 | 1-2142 | 15-2156 | AW299947, AI627241, | |
| | | | | | AI693196, AI693651, | |
| | | | | | AI912660, AW193683, | |
| | | | | | AI700973, N39338, | |
| | | | | | AA725613, AI129975, | |
| | | | | | AI420001, N39022, | |
| | | | | | AA446088, AA156932, | |
| | | | | | AI200504, AA156939, | |
| | | | | | W72621, AA608671, | |
| | | | | | W84482, AW071002, | |
| | | | | | AA429734, AA827783, | |
| | | | | | AI609691, AA789083, | |
| | | | | | AI096521, AI807324, | |
| | | | | | AI741384, AA135719, | |
| | | | | | AA682230, AI219693, | |
| | | | | | AI128552, AI457931, | |
| | | | | | AI183320, AW073830, | |
| | | | | | AA767680, W67456, | |
| | | | | | AI146559, AA406621, | |
| | | | | | AI191714, AA037151, | |
| | | | | | AA975460, AW236574, | |
| | | | | | N58764, AI282129, | |
| | | | | | AI220018, AI040340, | |
| | | | | | AI765710, N90492, | |
| | | | | | AA612607, AA877635, | |
| | | | | | AI422402, AA502264, | |
| | | | | | AA135877, AA150224, | |
| | | | | | AA148768, AW195886, | |
| | | | | | W03532, H98048, | |
| | | | | | AA722904, AA278951, | |
| | | | | | AA903213, R78489, | |
| | | | | | W19223, AA768151, | |
| | | | | | AA655014, AI418277, | |
| | | | | | R66829, AI380027, N67714, | |
| | | | | | T84077, AA973687, | |
| | | | | | AA569504, R74090, | |
| | | | | | AA742936, AI242123, | |
| | | | | | AA027856, H77471, | |
| | | | | | H97347, H02008, R67927, | |
| | | | | | AW207778, AA654277, | |
| | | | | | AA135876, AA688191, | |
| | | | | | R24196, H02106, H77472, | |
| | | | | | AA216739, AI916580, | |
| | | | | | R66743, N77448, T56468, | |
| | | | | | H88133, N39327, | |
| | | | | | AA150679, N45175, | |
| | | | | | AI652805, AA644283, | |
| | | | | | AI263823, R31686, | |
| | | | | | W84328, AI458900, | |
| | | | | | H88134, N69228, H00833, | |
| | | | | | R74089, AA150756, | |
| | | | | | H01217, AA906258, | |
| | | | | | AA569516, R24195, | |
| | | | | | R78529, AA479390, | |
| | | | | | N45185, AA907738, | |
| | | | | | T56521, AA903324, | |
| | | | | | AW371074, AA353909, | |
| | | | | | T97790, AA579836, | |
| | | | | | AA879472, H12526, | |
| | | | | | AA927935, AA216519, | |
| | | | | | AA975448, H12473, | |
| | | | | | R27236, T83430, | |
| | | | | | AA411693, R61052, | |
| | | | | | R27440, AI698993, R69359, | |
| | | | | | R69360, W25349, T97690, | |
| | | | | | N30828, AA027912, | |
| | | | | | AI269274, W67457, | |
| | | | | | R31728, AA283743, | |
| | | | | | AA927936, AI192400, | |
| | | | | | AL049940, AF179286, | |
| | | | | | AB029551, AF101779, and | |
| | | | | | AF085840. | |
| HE9RA75 | 122 | 766779 | 1-651 | 15-665 | AC009648, AC009648, | |
| | | | | | AP002502, AP002502, | |
| | | | | | AP000907, AP000907, | |
| | | | | | AP000788, and AP000788. | |
| HOUHO89 | 123 | 1085594 | 1-750 | 15-764 | H43782, and AB002378. | |
| HFITE38 | 124 | 1063475 | 1-604 | 15-618 | AI554624, AI313133, | |
| | | | | | AW391980, W76458, | |
| | | | | | AW401574, AW411042, | |
| | | | | | AA357067, W61124, | |
| | | | | | AW360837, C18294, | |
| | | | | | AA852415, T35790, | |
| | | | | | AL138163, T35190, | |
| | | | | | T35980, AA331917, | |
| | | | | | AA115838, T30710, | |
| | | | | | AA894909, T32095, | |
| | | | | | AW088409, AI951963, | |
| | | | | | AI909669, D55453, | |
| | | | | | AW361222, AI983723, | |
| | | | | | AI921707, AI205283, | |
| | | | | | AA868496, Z20579, | |
| | | | | | AA551115, AI811575, | |
| | | | | | T08329, AI570120, | |
| | | | | | AI963063, AI697147, | |
| | | | | | AA378552, N56257, | |
| | | | | | AW073182, AA613956, | |
| | | | | | AA971201, H18459, | |
| | | | | | AA116100, AA507600, | |
| | | | | | AI269028, AW338692, | |
| | | | | | AA736816, AI077651, | |
| | | | | | AI377484, AA703778, | |
| | | | | | AI535813, N47602, | |
| | | | | | AA424243, AW148920, | |
| | | | | | W63686, AA765057, | |
| | | | | | AW166594, AI203352, | |
| | | | | | AA035103, AI354635, | |
| | | | | | AA749002, AI302562, | |
| | | | | | AA535981, AA451680, | |
| | | | | | AW163074, AA035501, | |
| | | | | | AA723482, AA535894, | |
| | | | | | AI955639, AA909787, | |
| | | | | | AI092656, AA706448, | |
| | | | | | AA172257, AA665951, | |
| | | | | | AI333516, AA478500, | |
| | | | | | AA371686, AA923643, | |
| | | | | | Z38401, T32094, | |
| | | | | | AA116099, AI204027, | |
| | | | | | AI890693, N45490, | |
| | | | | | AA452876, AA452303, | |
| | | | | | AI928430, N55103, | |
| | | | | | AI824568, R60321, | |
| | | | | | AI362729, AA703829, | |
| | | | | | AA908497, AI207027, | |
| | | | | | AA935306, N92292, | |
| | | | | | AW182581, R15571, | |
| | | | | | AA719390, AA346276, | |
| | | | | | AI139827, AI091673, | |
| | | | | | AA723475, AI040346, | |
| | | | | | AW050447, AA310762, | |
| | | | | | AA729774, AI216208, | |
| | | | | | AI538886, AA853070, | |
| | | | | | AW078554, AI684984, | |
| | | | | | AI096337, AI690416, | |
| | | | | | AA437256, AA916279, | |
| | | | | | AI745105, AI222527, | |
| | | | | | AA866024, AI199134, | |
| | | | | | AI271816, AW189656, | |
| | | | | | AI129909, T16000, | |
| | | | | | AW072608, AI669857, | |
| | | | | | AI095643, AI144522, | |
| | | | | | AI598169, T15580, | |
| | | | | | AI612922, AI564907, | |
| | | | | | AA176356, AI263062, | |
| | | | | | AA016219, AA613497, | |
| | | | | | AI565670, AI306585, | |
| | | | | | AI934895, AI337663, | |
| | | | | | AW001407, AA931614, | |
| | | | | | AA732764, AA722353, | |
| | | | | | AA703701, T33343, | |
| | | | | | AA587632, T31391, | |
| | | | | | AA643880, T63580, | |
| | | | | | AA643888, AI917557, | |
| | | | | | T32270, R22550, R80887, | |
| | | | | | AA284974, AA478139, | |
| | | | | | AI742813, H13755, R23603, | |
| | | | | | AA079293, AI675597, | |
| | | | | | AA662312, AW167217, | |
| | | | | | AA613412, AA604206, | |
| | | | | | R08104, AA877259, | |
| | | | | | AA470818, AA532869, | |
| | | | | | AA483863, R22551, | |
| | | | | | AI301879, AA478499, | |
| | | | | | AA854235, AI354236, | |
| | | | | | W73618, AW005176, | |
| | | | | | AA081759, T84898, | |
| | | | | | AA745131, AA552419, | |
| | | | | | AI369794, T15699, | |
| | | | | | AA573836, AA706559, | |
| | | | | | AI924630, AI688807, | |
| | | | | | H62299, R95675, AI857403, | |
| | | | | | T62981, AI954547, | |
| | | | | | AA400971, R70679, | |
| | | | | | W23225, AI061326, | |
| | | | | | AI318066, AA039316, | |
| | | | | | AW068748, R26158, | |
| | | | | | AA868790, R42434, | |
| | | | | | AA706564, AA991528, | |
| | | | | | AI269944, W72172, | |
| | | | | | AA654947, AA328222, | |
| | | | | | T51637, AI933327, | |
| | | | | | AA401010, T03649, | |
| | | | | | AA657656, AA781871, | |
| | | | | | AA113973, H13703, | |
| | | | | | W68563, AA478138, | |
| | | | | | AI972887, T91316, U92544, | |
| | | | | | AF128527, AF128528, | |
| | | | | | Z98046, AF126181, and | |
| | | | | | A75460. | |
| HSXCB49 | 125 | 800501 | 1-684 | 15-698 | | |
| HHFGP83 | 126 | 828162 | 1-325 | 15-339 | AC026329, and AC026348. | |
| HPLBP54 | 127 | 1212679 | 1-1901 | 15-1915 | C16805, C17480, D58975, | |
| | | | | | C18261, C16945, C18700, | |
| | | | | | C18638, C18027, C16784, | |
| | | | | | C18260, C18222, C17488, | |
| | | | | | D58770, C16946, C18483, | |
| | | | | | C17653, C17965, D58978, | |
| | | | | | C17490, C18701, C17740, | |
| | | | | | C18747, C18449, C17748, | |
| | | | | | D58838, C18252, C17885, | |
| | | | | | C18988, D58702, C18964, | |
| | | | | | C19012, D58739, C18542, | |
| | | | | | D58759, C16754, C17095, | |
| | | | | | C17755, C17886, C16794, | |
| | | | | | C18933, D58837, D59219, | |
| | | | | | C17939, C17663, C17522, | |
| | | | | | C17714, C17766, D58840, | |
| | | | | | D58983, D59184, C16856, | |
| | | | | | C18711, C17278, C17232, | |
| | | | | | C17696, C17749, D58550, | |
| | | | | | C18624, C18255, C17586, | |
| | | | | | D58903, D58947, C17836, | |
| | | | | | C18888, D58967, C18824, | |
| | | | | | D58566, C17667, D58713, | |
| | | | | | C17572, C18607, C18466, | |
| | | | | | D58779, C18475, C17669, | |
| | | | | | C18611, C18500, D58543, | |
| | | | | | C17876, D58655, | |
| | | | | | AA340250, C16767, | |
| | | | | | C18442, C17741, C17818, | |
| | | | | | C16785, D58942, C17390, | |
| | | | | | C17721, C18910, C18749, | |
| | | | | | C17700, D58915, D59228, | |
| | | | | | C18013, C17068, C17334, | |
| | | | | | C17982, C17833, C18143, | |
| | | | | | C18917, D58491, C18541, | |
| | | | | | C18469, D58612, C18074, | |
| | | | | | C18717, C17992, C18349, | |
| | | | | | C16802, D58800, C18889, | |
| | | | | | D58758, D58968, C17371, | |
| | | | | | D59152, C17427, C18066, | |
| | | | | | C18166, C17240, C17932, | |
| | | | | | C16816, C17415, C18551, | |
| | | | | | C17817, C18038, C17802, | |
| | | | | | C17792, C16893, C17705, | |
| | | | | | C17089, D58946, C18750, | |
| | | | | | C18287, D59119, D58496, | |
| | | | | | D58742, D58823, C18292, | |
| | | | | | C18347, N71116, C18696, | |
| | | | | | C17432, C18423, C17348, | |
| | | | | | AA368116, C17053, | |
| | | | | | C19078, D58955, D58925, | |
| | | | | | C17670, C18714, C18180, | |
| | | | | | C17421, C17769, C17767, | |
| | | | | | C17239, C18621, C16824, | |
| | | | | | C17125, C18058, C18625, | |
| | | | | | C16806, C17265, C18663, | |
| | | | | | C16764, D59000, D58786, | |
| | | | | | C17950, D58552, C18649, | |
| | | | | | C17981, C19088, C17417, | |
| | | | | | D58653, D59059, D58600, | |
| | | | | | C17666, C18956, D59075, | |
| | | | | | C17498, C18610, D58984, | |
| | | | | | C18958, C18534, | |
| | | | | | AA367984, C18674, | |
| | | | | | C16864, C18758, C17943, | |
| | | | | | C18365, C17999, C17910, | |
| | | | | | C17601, C17772, D59187, | |
| | | | | | C18603, C18568, C17662, | |
| | | | | | C17925, C18425, C17302, | |
| | | | | | C18966, C17575, D58593, | |
| | | | | | C18090, C17283, C16817, | |
| | | | | | C17790, C18367, D58445, | |
| | | | | | C18196, C18508, C18676, | |
| | | | | | D58572, C18643, C18806, | |
| | | | | | C17158, C16957, C18709, | |
| | | | | | D58995, D58993, C18380, | |
| | | | | | C18477, AI261401, C17822, | |
| | | | | | D58834, C19051, | |
| | | | | | AA367416, C17873, | |
| | | | | | C18384, D58907, C17543, | |
| | | | | | C18463, C17033, D58648, | |
| | | | | | C18078, C18761, C18506, | |
| | | | | | C17128, D58682, D59081, | |
| | | | | | D58675, C19014, D58540, | |
| | | | | | C17723, C18313, C16871, | |
| | | | | | C17516, C18413, J00118, | |
| | | | | | V00573, K02401, J00289, | |
| | | | | | J03071, AF065215, | |
| | | | | | AF065216, A00469, | |
| | | | | | V00519, AF121908, | |
| | | | | | E00009, M15894, L16556, | |
| | | | | | E00952, A12770, A15072, | |
| | | | | | A15074, A03992, A03994, | |
| | | | | | M15895, M38451, L16552, | |
| | | | | | L16554, E00141, J03756, | |
| | | | | | 134298, AF006061, L16555, | |
| | | | | | L16553, M13438, E00974, | |
| | | | | | V00520, AF006060, I41411, | |
| | | | | | I02851, V00593, I03501, | |
| | | | | | E01123, I02448, I13723, | |
| | | | | | I01079, I03165, A63631, | |
| | | | | | E15607, E01250, E15608, | |
| | | | | | E15609, E01249, E00140, | |
| | | | | | K00470, I02856, E00814, | |
| | | | | | E00813, E00812, I07973, | |
| | | | | | I17475, I34299, I03481, | |
| | | | | | U02293, AF110644, I03167, | |
| | | | | | I03503, E00002, A00501, | |
| | | | | | I02588, E01441, A18985, | |
| | | | | | I34300, I18458, E08200, | |
| | | | | | E05299, I02855, A10352, | |
| | | | | | I21239, A04711, A04745, | |
| | | | | | A04746, A04712, A17655, | |
| | | | | | I02858, AF023477, I02857, | |
| | | | | | M25118, A17660, A17661, | |
| | | | | | I63120, and AB019574. | |
| HCE4R40 | 128 | 858456 | 1-401 | 15-415 | AW161406, R90781, | |
| | | | | | D86957, A87006, | |
| | | | | | AC004775, and AC005742. | |
| HRABU93 | 129 | 1206777 | 1-2267 | 15-2281 | AW161406, W22101, | |
| | | | | | AW163611, AW140025, | |
| | | | | | AA326433, R90781, | |
| | | | | | R53169, AA446363, | |
| | | | | | U83543, AI380305, H19578, | |
| | | | | | H23911, H51386, H19075, | |
| | | | | | H46576, AI609704, D86957, | |
| | | | | | A87006, AC004775, and | |
| | | | | | AC005742. | |
| HWLQH41 | 130 | 1176226 | 1-1249 | 15-1263 | AI417842, AI127930, | |
| | | | | | AI202751, AW237652, | |
| | | | | | AW241522, AI633241, | |
| | | | | | AA828649, AI056043, | |
| | | | | | AI097032, AA595596, | |
| | | | | | AI332697, AW009101, | |
| | | | | | AI391721, AI288942, | |
| | | | | | AI742779, AI741429, | |
| | | | | | AW338282, AI633779, | |
| | | | | | AI218345, AI971047, | |
| | | | | | AI290280, AI754557, | |
| | | | | | AA812206, AA586780, | |
| | | | | | AW117606, AI924489, | |
| | | | | | AI284061, AI689103, | |
| | | | | | AW207270, AW294513, | |
| | | | | | AA568817, AI478517, | |
| | | | | | AI657130, AI074577, | |
| | | | | | AI990149, AA806346, | |
| | | | | | N51855, AI149292, D61975, | |
| | | | | | AI033281, AA384212, | |
| | | | | | AI917469, N53363, N73526, | |
| | | | | | H23985, R28358, | |
| | | | | | AA677342, AA776965, | |
| | | | | | AA878338, H91288, | |
| | | | | | AA748783, H90379, | |
| | | | | | R28562, AA328303, | |
| | | | | | H22705, AI719957, N54120, | |
| | | | | | N46676, AA354773, | |
| | | | | | AI001793, AI553758, | |
| | | | | | N39234, AF085734, | |
| | | | | | AJ236876, AJ236912, | |
| | | | | | AF072521, and AJ007780. | |
| HMJAH16 | 131 | 1176228 | 1-655 | 15-669 | AI417842, AI127930, | |
| | | | | | AI202751, AW237652, | |
| | | | | | AW241522, AI633241, | |
| | | | | | AA384212, AI742779, | |
| | | | | | AI056043, AA828649, | |
| | | | | | AI290280, AW009101, | |
| | | | | | AA595596, AI097032, | |
| | | | | | AI332697, AI391721, | |
| | | | | | AI288942, AI741429, | |
| | | | | | AW338282, AI633779, | |
| | | | | | AI971047, AI218345, | |
| | | | | | H22705, D61975, H90379, | |
| | | | | | AI924489, AW117606, | |
| | | | | | AI754557, AI284061, | |
| | | | | | AA812206, N54120, | |
| | | | | | AI689103, AA878338, | |
| | | | | | AW207270, AW294513, | |
| | | | | | AI478517, AA776965, | |
| | | | | | AI074577, AI657130, | |
| | | | | | AI990149, N46676, | |
| | | | | | AA568817, AA354773, | |
| | | | | | R28562, N51855, AI149292, | |
| | | | | | AI001793, AA806346, | |
| | | | | | AI553758, AJ236912, | |
| | | | | | AJ236876, AF085734, | |
| | | | | | AJ007780, and AF072521. | |
| HBMXU88 | 132 | 1228331 | 1-3849 | 15-3863 | AW069306, AI743175, | |
| | | | | | AI803970, AI811472, | |
| | | | | | AI027704, AA099277, | |
| | | | | | AI168623, AI276150, | |
| | | | | | AI824726, AA213703, | |
| | | | | | AW243339, AA287703, | |
| | | | | | AA483707, AA287702, | |
| | | | | | AA213668, AI653168, | |
| | | | | | AA371310, AI434885, | |
| | | | | | R38844, AA355129, | |
| | | | | | AA342147, AA342146, | |
| | | | | | AA365652, AA828028, | |
| | | | | | AI581083, AA927786, | |
| | | | | | AA282618, AA099276, | |
| | | | | | AW364617, AA027167, | |
| | | | | | AI968421, F24601, | |
| | | | | | AI913352, AI302397, | |
| | | | | | AI040349, T56496, R05710, | |
| | | | | | T83234, AI984941, | |
| | | | | | AI184494, AA480189, | |
| | | | | | AI128765, AA027168, | |
| | | | | | AA382209, AI935351, | |
| | | | | | AB023172, AP000245, | |
| | | | | | AP000127, AP000205, | |
| | | | | | AF143869, and AW572672. | |
| HNTCI60 | 133 | 1223477 | 1-3693 | 15-3707 | AL046015, AA768846, | |
| | | | | | AI671768, AI961239, | |
| | | | | | AI884699, AA514474, | |
| | | | | | AI521280, AI139530, | |
| | | | | | AA156958, AI679628, | |
| | | | | | AI885479, AI336225, | |
| | | | | | AI735075, AI186828, | |
| | | | | | AI626081, AI275985, | |
| | | | | | AI494518, AA749446, | |
| | | | | | AW089880, AI914010, | |
| | | | | | AW207720, AI130746, | |
| | | | | | AA976621, AI921928, | |
| | | | | | AA993271, AI130728, | |
| | | | | | AI299980, R19745, R84393, | |
| | | | | | W69667, AA742981, | |
| | | | | | AL046248, AA229014, | |
| | | | | | AI279330, AA156866, | |
| | | | | | AI216523, AA255782, | |
| | | | | | AI811823, AA488821, | |
| | | | | | AI419263, AA489068, | |
| | | | | | AA229863, AA705638, | |
| | | | | | AA701250, AA229731, | |
| | | | | | N47318, AW271763, | |
| | | | | | AA687125, W73367, | |
| | | | | | AL044304, AA862901, | |
| | | | | | AW272381, AW372345, | |
| | | | | | AA939081, AW021871, | |
| | | | | | W73428, AI478491, | |
| | | | | | AA702739, AA977247, | |
| | | | | | AA765337, W45513, | |
| | | | | | AI141957, F06156, | |
| | | | | | AA127066, R84392, | |
| | | | | | AI283582, AI985183, | |
| | | | | | AW439593, AI186368, | |
| | | | | | AI687916, AI560741, | |
| | | | | | AI203537, AA047572, | |
| | | | | | W69666, H66133, | |
| | | | | | AI081094, AA453238, | |
| | | | | | AA356896, AA463404, | |
| | | | | | AW294792, AA318684, | |
| | | | | | Z25224, H66549, | |
| | | | | | AA373158, AA011074, | |
| | | | | | N92391, AA480226, | |
| | | | | | AW292636, H43300, | |
| | | | | | AI222506, AA378963, | |
| | | | | | AA492470, AA579885, | |
| | | | | | T47922, W24708, T47923 | |
| | | | | | AA348753, T05906, | |
| | | | | | AA455850, H43299, | |
| | | | | | AI419633, AW292633, | |
| | | | | | AA011075, D61430, | |
| | | | | | AI587496, AL133683, | |
| | | | | | AA147480, AA772416, | |
| | | | | | AA325615, R45164, | |
| | | | | | AA714016, AA130104, | |
| | | | | | AI560507, AW272813, | |
| | | | | | AW376847, AI471022, | |
| | | | | | H16172, AI568064, | |
| | | | | | AA378964, R68334, | |
| | | | | | AI567645, AA256004, | |
| | | | | | AA341472, AW376809, | |
| | | | | | W45654, AI401496, | |
| | | | | | AA280280, AI905674, | |
| | | | | | AA887264, AA147880, | |
| | | | | | AA704633, AA429202, | |
| | | | | | AI905673, AI216605, | |
| | | | | | AW168495, C14179, | |
| | | | | | AI963999, AC020663, | |
| | | | | | U70255, AC002094, | |
| | | | | | L06564, U72484, X89268, | |
| | | | | | and AF005380. | |
| HTLDS55 | 134 | 1182304 | 1-1302 | 15-1316 | AI890919, AI018797, | |
| | | | | | AA913452, AI797580, | |
| | | | | | AI809012, AI187382, | |
| | | | | | AA448485, AI554914, | |
| | | | | | AW137847, AI393577, | |
| | | | | | AA382830, AA432050, | |
| | | | | | AA609003, and AC020663. | |
| HWMAE53 | 135 | 1187258 | 1-436 | 15-450 | AA368584, and AB023227. | |
| HTODG16 | 136 | 1057155 | 1-591 | 15-605 | AW403969, AA252781, | |
| | | | | | and AL041242. | |
| HFXCG28 | 137 | 1199587 | 1-1454 | 15-1468 | AL080117, AB023176, and | |
| | | | | | U14103. | |
| HFTCU45 | 138 | 910053 | 1-538 | 15-552 | U47343, AA325176, | |
| | | | | | AA463333, and AA323357. | |
| HFTBL33 | 139 | 1222661 | 1-2136 | 15-2150 | AI677902, AI338780, | |
| | | | | | AI684570, AI928887, | |
| | | | | | AW136644, AW264299, | |
| | | | | | AI652923, AI089627, | |
| | | | | | AI298483, AI372875, | |
| | | | | | AA463846, AI141311, | |
| | | | | | AW129570, AW204313, | |
| | | | | | AI374899, AW134722, | |
| | | | | | AW305132, AI366527, | |
| | | | | | AA463333, AA031465, | |
| | | | | | U47343, AI654427, | |
| | | | | | AW205086, W26816, | |
| | | | | | AI217285, D81166, | |
| | | | | | AA906309, AI382756, | |
| | | | | | AA031486, D80712, | |
| | | | | | AA054522, AA325176, | |
| | | | | | AA884159, AA323357, | |
| | | | | | AA247154, N71729, | |
| | | | | | C15737, N71226, AI557264, | |
| | | | | | AI541393, AI557278, and | |
| | | | | | A84916. | |
| HCEPH84 | 140 | 1148128 | 1-1499 | 15-1513 | AA442393, AA019932, | |
| | | | | | W76203, AI372800, | |
| | | | | | R56176, AI372801, | |
| | | | | | AW248425, AA350199, | |
| | | | | | T77421, AA054057, | |
| | | | | | AI298004, T75382, T47787, | |
| | | | | | AA018176, F08410, | |
| | | | | | AA058754, R55903, | |
| | | | | | R36279, AA191072, | |
| | | | | | AA180848, AA194490, | |
| | | | | | F13127, AA193053, | |
| | | | | | AA326216, R16315, | |
| | | | | | AA663485, AA166864, | |
| | | | | | AA204736, AA249839, | |
| | | | | | F05591, AI651722, | |
| | | | | | AA167722, Z42609, | |
| | | | | | AW138074, AA339074, | |
| | | | | | AA054202, AA056327, | |
| | | | | | AI479964, AA207119, | |
| | | | | | AI221332, F26963, F36674, | |
| | | | | | F28731, AI937722, F36659, | |
| | | | | | AI609568, F25641, F25571, | |
| | | | | | T33292, AA058465, | |
| | | | | | F33105, AA206829, | |
| | | | | | AA436615, R49566, | |
| | | | | | R55818, AA193004, | |
| | | | | | AI194037, R56064, | |
| | | | | | AA019920, AA191589, | |
| | | | | | R51792, T51483, Z25123, | |
| | | | | | F23450, AA054088, | |
| | | | | | R38363, W72966, Z41401, | |
| | | | | | AA054025, F01857, | |
| | | | | | AA194690, F10729, | |
| | | | | | F17797, F35038, F02117, | |
| | | | | | Z63803, Z64258, Z63848, | |
| | | | | | Z61697, Z61696, and | |
| | | | | | Z64257. | |
| HHFON19 | 141 | 1061675 | 1-333 | 15-347 | AA356476, and AC003072. | |
| HEMCL65 | 142 | 910900 | 1-453 | 15-467 | AI902552, and AI902562. | |
| HMAMB94 | 143 | 910909 | 1-627 | 15-641 | AA158332, R90961, | |
| | | | | | R90977, and R90972. | |
| HFICR59 | 144 | 1171979 | 1-1021 | 15-1035 | AI190165, AI979249, | |
| | | | | | AI917302, AI633819, | |
| | | | | | AI624750, AI471728, | |
| | | | | | AW196791, AI985423, | |
| | | | | | AI471611, AA609421, | |
| | | | | | AA705338, N22327, | |
| | | | | | AA811162, N75202, | |
| | | | | | AI922484, H79904, H79810, | |
| | | | | | AW407702, AF162130, | |
| | | | | | AC005084, and AF161181. | |
| HSXDD55 | 145 | 911460 | 1-1164 | 15-1178 | AA446069, H19388, | |
| | | | | | AA121710, AA429913, | |
| | | | | | F07861, H12126, | |
| | | | | | AW104301, H55229, and | |
| | | | | | AB002349. | |
| HCQCI06 | 146 | 915000 | 1-1190 | 15-1204 | AI123952, AI751915, | |
| | | | | | AA343597, W79144, | |
| | | | | | AA345718, AA304549, | |
| | | | | | AA256582, W81545, | |
| | | | | | D45547, AL117664, | |
| | | | | | AC068763, AC068763, and | |
| | | | | | AC069223. | |
| HPMLJ44 | 147 | 1199601 | 1-1771 | 15-1785 | AA778721, AI309326, | |
| | | | | | AI923088, AW157189, | |
| | | | | | AW009559, N21676, | |
| | | | | | AW277241, AA056157, | |
| | | | | | AI015567, AA142926, | |
| | | | | | AA935517, N71214, | |
| | | | | | AI340068, AA046446, | |
| | | | | | AI890415, AI760248, | |
| | | | | | AI421490, AI423473, | |
| | | | | | AA576688, AI342399, | |
| | | | | | AA405935, AA946956, | |
| | | | | | AW403205, AA826534, | |
| | | | | | AA143149, AA313266, | |
| | | | | | AI803454, AA594414, | |
| | | | | | AA233629, AA125818, | |
| | | | | | N22011, AI862039, | |
| | | | | | AA315935, AW148924, | |
| | | | | | AI245757, AW374039, | |
| | | | | | N80237, AA488928, | |
| | | | | | W33046, AW304989, | |
| | | | | | AI953431, AA782164, | |
| | | | | | H89121, T78059, AI344475, | |
| | | | | | AA074821, AI148049, | |
| | | | | | AW163161, AI707964, | |
| | | | | | AA702036, AA864308, | |
| | | | | | AA034997, AA058701, | |
| | | | | | AA045662, AA172038, | |
| | | | | | AW057651, AA084570, | |
| | | | | | AW438849, AI708566, | |
| | | | | | AA743021, AA135017, | |
| | | | | | C05053, AA045663, | |
| | | | | | AA312059, AW268698, | |
| | | | | | AW078896, AA047840, | |
| | | | | | AA894905, AA724345, | |
| | | | | | AA586355, AA947891, | |
| | | | | | AA053980, N31083, | |
| | | | | | AI024387, AA878972, | |
| | | | | | N31289, AI631228, | |
| | | | | | W38328, AL048109, | |
| | | | | | F13274, T59457, | |
| | | | | | AA172290, AA831417, | |
| | | | | | AI905071, AA125949, | |
| | | | | | H06542, AA018173, | |
| | | | | | AW337421, H06484, | |
| | | | | | T06616, AA837059, | |
| | | | | | T77300, AW295581, | |
| | | | | | AA759329, R39702, | |
| | | | | | Z39935, F10872, | |
| | | | | | AA057237, T36230, | |
| | | | | | H89228, AA373169, | |
| | | | | | AA233777, AA598442, | |
| | | | | | D53439, AA035459, | |
| | | | | | AA056096, AA484066, | |
| | | | | | T19033, R96192, | |
| | | | | | AA693386, AL048108, | |
| | | | | | AW392317, AI090106, | |
| | | | | | AA732389, AW150491, | |
| | | | | | Z43869, R38185, AI270737, | |
| | | | | | W04596, Z37004, T18978, | |
| | | | | | AA501472, AA483236, | |
| | | | | | AA383381, H41069, | |
| | | | | | AA749100, AI200780, | |
| | | | | | AA079574, AA580553, | |
| | | | | | AA405183, AA079526, | |
| | | | | | AW189389, N56489, | |
| | | | | | D19937, AI905101, | |
| | | | | | AR044461, and AF061739. | |
| HNTCU51 | 148 | 1223479 | 1-2837 | 15-2851 | AW390189, AW068631, | |
| | | | | | AW068632, AW083013, | |
| | | | | | AW299875, AA042847, | |
| | | | | | AA868916, AI632320, | |
| | | | | | AA861695, AI823835, | |
| | | | | | AL039139, AW340822, | |
| | | | | | AI700370, AA975794, | |
| | | | | | AI342192, AI928261, | |
| | | | | | AW390370, AA480338, | |
| | | | | | W78034, N36497, | |
| | | | | | AI635086, N66488, | |
| | | | | | W56029, N41511, H42127, | |
| | | | | | AI307661, AI610367, | |
| | | | | | AI735104, AA643969, | |
| | | | | | W40245, AI087138, | |
| | | | | | AI383572, W40506, | |
| | | | | | AI570860, AI089368, | |
| | | | | | AI375757, AI813851, | |
| | | | | | H42126, AI248569, | |
| | | | | | AI243286, H03624, N25781, | |
| | | | | | N25786, AW291887, | |
| | | | | | R81326, W07239, N36492, | |
| | | | | | AA243297, AI221570, | |
| | | | | | AI140829, R81575, | |
| | | | | | AA101761, AW195338, | |
| | | | | | AW390411, AI888835, | |
| | | | | | AA463566, AI206788, | |
| | | | | | N78809, AW074503, | |
| | | | | | H03625, AA778483, | |
| | | | | | AL041056, N52929, | |
| | | | | | AL039152, AW452298, | |
| | | | | | D79350, AW392781, | |
| | | | | | AA514883, N40562, | |
| | | | | | AI583048, AA249501, | |
| | | | | | AI125441, AA382265, | |
| | | | | | D79601, N46605, | |
| | | | | | AA248652, AA044396, | |
| | | | | | AA299610, AI221697, | |
| | | | | | D25811, AA405866, | |
| | | | | | AI932292, and AL049934. | |
| HNFDO52 | 149 | 916260 | 1-345 | 15-359 | AA357035, U23853, | |
| | | | | | L11329, and AC012307. | |
| HSHBW40 | 150 | 1144361 | 1-1120 | 15-1134 | AA393046, AA449274, | |
| | | | | | AI417305, H54361, | |
| | | | | | AA450152, H89797, | |
| | | | | | AA045551, AA315053, | |
| | | | | | W28083, AI925931, | |
| | | | | | AI810820, AA310873, | |
| | | | | | R83856, R33893, T78727, | |
| | | | | | R18673, AA306399, | |
| | | | | | AA306395, AA126773, | |
| | | | | | AA324948, AA450094, | |
| | | | | | AW379133, T77732, | |
| | | | | | T27901, W25779, T51655, | |
| | | | | | W25559, AW189057, | |
| | | | | | R14561, T78180, H48688, | |
| | | | | | AW365287, AI342499, | |
| | | | | | W25778, R56439, | |
| | | | | | AI858990, AA374368, | |
| | | | | | AW362215, AI609827, | |
| | | | | | AA344165, AI655305, | |
| | | | | | AA121371, H77659, | |
| | | | | | R18418, R34534, H87657, | |
| | | | | | AA378311, AI269259, | |
| | | | | | R08800, AA366795, | |
| | | | | | N99789, AW365290, | |
| | | | | | N51168, R55512, | |
| | | | | | AW378738, AI903043, | |
| | | | | | AA609451, AW378748, | |
| | | | | | AA493146, AA480655, | |
| | | | | | AI874365, R34545, | |
| | | | | | AA862146, AA931827, | |
| | | | | | AA864423, AW450406, | |
| | | | | | AI128080, AW378763, | |
| | | | | | R87869, AI139593, | |
| | | | | | AA716045, AA857294, | |
| | | | | | AI093259, AA665796, | |
| | | | | | AA890188, AA828411, | |
| | | | | | AI271946, AA255578, | |
| | | | | | AA121361, AA628775, | |
| | | | | | AA126760, AI343939, | |
| | | | | | AI373574, AI197888, | |
| | | | | | AI261530, AW003083, | |
| | | | | | AA114177, AI744469, | |
| | | | | | AA449220, AI339832, | |
| | | | | | AI337024, AI885656, | |
| | | | | | AA311426, N92854, | |
| | | | | | AI870955, AI680690, | |
| | | | | | R98212, R98213, R56440, | |
| | | | | | AI935195, F06274, | |
| | | | | | AF225971, M61764, | |
| | | | | | AB015946, and AC004985. | |
| HHEJR23 | 151 | 1200643 | 1-930 | 15-944 | AI440338, AA868192, | |
| | | | | | AI808409, AI567414, | |
| | | | | | AI278014, AI291975, | |
| | | | | | AW304837, AW024447, | |
| | | | | | AI341786, AI183586, | |
| | | | | | AW024630, AI208559, | |
| | | | | | AI302861, AA043196, | |
| | | | | | AI492200, AW103254, | |
| | | | | | AA731505, AA741444, | |
| | | | | | AI160734, AI868969, | |
| | | | | | AI214841, AI469608, | |
| | | | | | AA947737, AI351129, | |
| | | | | | AA045490, AA043598, | |
| | | | | | AA970703, AI095776, | |
| | | | | | D25707, T19154, AI187765, | |
| | | | | | AA058909, AW087623, | |
| | | | | | AA652268, AA507020, | |
| | | | | | AA291791, AW449034, | |
| | | | | | AA434511, AI809374, | |
| | | | | | AW087534, AI571861, | |
| | | | | | AI273142, AI247193, | |
| | | | | | AI886206, AI280747, | |
| | | | | | AI681985, AL120736, | |
| | | | | | AI621209, AI611348, | |
| | | | | | AI817552, AI932794, | |
| | | | | | AW149227, AI817543, | |
| | | | | | AW084786, AW088793, | |
| | | | | | AW302988, AI564247, | |
| | | | | | AI554821, AI270183, | |
| | | | | | AI637584, AI925156, | |
| | | | | | AW075413, AI420521, | |
| | | | | | AI497733, AI567351, | |
| | | | | | AI524671, AW071417, | |
| | | | | | AI318280, AI955906, | |
| | | | | | AI680498, AW081036, | |
| | | | | | AI634224, AI572787, | |
| | | | | | AI174394, AW083175, | |
| | | | | | AW129106, AI802542, | |
| | | | | | AI978703, AI499263, | |
| | | | | | AI335426, AI348777, | |
| | | | | | AI539808, AW188382, | |
| | | | | | AI864836, AW085906, | |
| | | | | | AI567612, AI648684, | |
| | | | | | AI783792, AI499146, | |
| | | | | | AI554485, AI628324, | |
| | | | | | AL042628, AW074172, | |
| | | | | | AI473554, AI493576, | |
| | | | | | AW198090, AI800453, | |
| | | | | | AI500077, AI871923, | |
| | | | | | AI918655, AI829327, | |
| | | | | | AI571439, AI620639, | |
| | | | | | AI572418, AI929108, | |
| | | | | | AI800433, AI280661, | |
| | | | | | AL134999, AI620015, | |
| | | | | | AI345416, AI345612, | |
| | | | | | AI869367, AI624693, | |
| | | | | | AI889376, AI917252, | |
| | | | | | AI241819, AW082033, | |
| | | | | | AI570781, AI536685, | |
| | | | | | AI345415, AL040243, | |
| | | | | | AL036146, AI252023, | |
| | | | | | AW302992, AI280751, | |
| | | | | | AI866770, AI824648, | |
| | | | | | AW083750, AI926790, | |
| | | | | | AW020693, AW169671, | |
| | | | | | AI538716, AI683475, | |
| | | | | | AA225339, AI619607, | |
| | | | | | AI439717, AI365256, | |
| | | | | | AI476109, AI560099, | |
| | | | | | AI492540, AI537303, | |
| | | | | | AW080992, AI818980, | |
| | | | | | AL046942, AW023590, | |
| | | | | | AW151786, AW130776, | |
| | | | | | AW152469, AL038605, | |
| | | | | | AL119863, AI285735, | |
| | | | | | AI758437, AW079654, | |
| | | | | | AI312542, AW131282, | |
| | | | | | AI383919, AW090700, | |
| | | | | | AI873644, AW118382, | |
| | | | | | AI564719, AI269205, | |
| | | | | | AL042551, AI582932, | |
| | | | | | AI282504, AI828705, | |
| | | | | | AI590118, AI288285, | |
| | | | | | AI801322, AI801544, | |
| | | | | | AI269862, AI698391, | |
| | | | | | AW167410, AI269696, | |
| | | | | | AI784252, AI344928, | |
| | | | | | AW074869, AW166865, | |
| | | | | | AW054931, AI431909, | |
| | | | | | AI619502, AI862139, | |
| | | | | | AI569583, AI440426, | |
| | | | | | AI306705, AI670002, | |
| | | | | | AW169653, AI612759, | |
| | | | | | AW152186, AI591420, | |
| | | | | | AL121014, AI636456, | |
| | | | | | AW105601, AI537617, | |
| | | | | | AI445165, AI680435, | |
| | | | | | AI621179, AI619716, | |
| | | | | | AI696606, AI866090, | |
| | | | | | AI476046, AI924686, | |
| | | | | | AI886753, AI923370, | |
| | | | | | AI572892, AI866798, | |
| | | | | | AI916419, AI818683, | |
| | | | | | AI431424, AI613270, | |
| | | | | | AI242931, AI886124, | |
| | | | | | AI591228, AI624548, | |
| | | | | | AI684036, AI961286, | |
| | | | | | AL042382, AL036980, | |
| | | | | | AW131331, AI826225, | |
| | | | | | AI963216, AI433157, | |
| | | | | | AW088899, AA508692, | |
| | | | | | AW303075, AL038445, | |
| | | | | | AI612885, AW080746, | |
| | | | | | AA012905, AI571909, | |
| | | | | | AI564426, AI863382, | |
| | | | | | AI271786, AL043326, | |
| | | | | | AL036396, AI608936, | |
| | | | | | AW268122, AW059837, | |
| | | | | | AL134830, AI537677, | |
| | | | | | AW089572, AW132001, | |
| | | | | | AI349957, AI815855, | |
| | | | | | AI537991, AW080402, | |
| | | | | | AW190042, AI922676, | |
| | | | | | AW103371, AW073994, | |
| | | | | | Z46372, AL137459, | |
| | | | | | AF113690, I89947, I48979, | |
| | | | | | AL117585, AF118094, | |
| | | | | | I48978, AL049314, | |
| | | | | | AL117460, AF177401, | |
| | | | | | A08916, I17767, A08913, | |
| | | | | | S68736, A08910, | |
| | | | | | AF118070, AL137271, | |
| | | | | | E02349, A08909, U42766, | |
| | | | | | AL137557, AL117435, | |
| | | | | | X96540, AL122098, I89931, | |
| | | | | | I49625, AF158248, | |
| | | | | | AF104032, AF183393, | |
| | | | | | X65873, AF113694, | |
| | | | | | X72889, AL110221, | |
| | | | | | AF090900, AL137463, | |
| | | | | | Y16645, X82434, | |
| | | | | | AL080127, AL122123, | |
| | | | | | AL122093, AF113019, | |
| | | | | | AL050024, I33392, | |
| | | | | | AF111851, X93495, | |
| | | | | | A03736, U00763, | |
| | | | | | AF017437, AL137550, | |
| | | | | | AJ238278, AL133075, | |
| | | | | | AF090903, AF125948, | |
| | | | | | AL137527, AL050393, | |
| | | | | | AF079765, AF067728, | |
| | | | | | AL133640, AF078844, | |
| | | | | | AL049452, A77033, | |
| | | | | | A77035, AL049464, | |
| | | | | | Y11587, AL133557, | |
| | | | | | AL110225, X63574, | |
| | | | | | AF118064, U67958, | |
| | | | | | AF113699, S78214, Z82022, | |
| | | | | | AF113676, AB019565, | |
| | | | | | A58524, A58523, | |
| | | | | | AF090934, AL110196, | |
| | | | | | AL049382, AL137648, | |
| | | | | | X84990, AL133016, | |
| | | | | | A12297, U72620, | |
| | | | | | AL137283, AF090943, | |
| | | | | | AJ242859, E07108, | |
| | | | | | AL050146, Y14314, | |
| | | | | | AL133606, AF106862, | |
| | | | | | AL049466, L31396, | |
| | | | | | AL080124, U80742, | |
| | | | | | AL137521, L31397, | |
| | | | | | AL080060, A65341, | |
| | | | | | X70685, AF017152, | |
| | | | | | AF146568, AL133565, | |
| | | | | | I03321, AF091084, | |
| | | | | | AL049300, AL133093, | |
| | | | | | AJ000937, AL122050, | |
| | | | | | AR059958, AL117457, | |
| | | | | | AL133560, AF026816, | |
| | | | | | AL080137, U35846, | |
| | | | | | AL122121, AL122110, | |
| | | | | | AL133080, AL049430, | |
| | | | | | AL050277, AL117583, | |
| | | | | | AF113691, AF113013, | |
| | | | | | AL050149, AL050116, | |
| | | | | | AL050108, AF090896, | |
| | | | | | AF090901, AF113677, | |
| | | | | | AF097996, Y11254, | |
| | | | | | AF125949, AL133568, | |
| | | | | | AL117394, AF061943, | |
| | | | | | AF113689, AL050138, | |
| | | | | | E03348, AL080159, | |
| | | | | | AL137538, AR011880, | |
| | | | | | AL133113, X98834, | |
| | | | | | A93016, AL049938, | |
| | | | | | AF087943, E07361, | |
| | | | | | AJ012755, AF119337, | |
| | | | | | A08912, E15569, | |
| | | | | | AL096744, 142402, | |
| | | | | | AL110197, U91329, I09360, | |
| | | | | | AL137560, 126207, | |
| | | | | | AL133072, AL049283, | |
| | | | | | AF026124, A93350, | |
| | | | | | AL133077, S61953, | |
| | | | | | AL122049, AL137556, | |
| | | | | | AL133014, AF081197, | |
| | | | | | E08263, E08264, | |
| | | | | | AL133104, AR000496, | |
| | | | | | U39656, AF111112, | |
| | | | | | AL110280, AF003737, | |
| | | | | | I00734, Y09972, E00617, | |
| | | | | | E00717, E00778, | |
| | | | | | AL050172, AL137476, | |
| | | | | | AL137480, AL137523, | |
| | | | | | U96683, AR038969, | |
| | | | | | AF153205, Y07905, | |
| | | | | | AF061573, AF079763, | |
| | | | | | A07647, AF185576, | |
| | | | | | AF081195, U68387, | |
| | | | | | AL133067, Z72491, | |
| | | | | | M30514, AF162270, | |
| | | | | | A45787, E05822, | |
| | | | | | AL080074, E08631, | |
| | | | | | AL117440, AJ006417, | |
| | | | | | AR038854, A90832, | |
| | | | | | AL117416, AL133098, | |
| | | | | | AL137294, AF057300, | |
| | | | | | AF057299, E04233, | |
| | | | | | U78525, AL137526, | |
| | | | | | U58996, X92070, | |
| | | | | | AF106827, L30117, Z37987, | |
| | | | | | U49908, U35146, L19437, | |
| | | | | | X87582, AL137292, | |
| | | | | | AF210052, AL137533, | |
| | | | | | AF111849, AL137529, | |
| | | | | | AF008439, AF067790, | |
| | | | | | AR013797, AL133665, | |
| | | | | | E02221, AF032666, | |
| | | | | | X62580, AL122111, | |
| | | | | | AL133031, AF051325, | |
| | | | | | AL117432, I41145, | |
| | | | | | AC002467, AL137478, | |
| | | | | | AF132676, AF061836, | |
| | | | | | AL122118, AL137488, and | |
| | | | | | AL050092. | |
| HCFMW71 | 152 | 1199561 | 1-1439 | 15-1453 | AI923217, AA197141, | |
| | | | | | AI814569, AI762903, | |
| | | | | | AI804682, AI804663, | |
| | | | | | AI143304, AA197116, | |
| | | | | | AI082030, AI911904, | |
| | | | | | AI139520, D53214, R92413, | |
| | | | | | AW274978, W93272, | |
| | | | | | AI183410, AW450838, | |
| | | | | | AI216343, AA680119, | |
| | | | | | AI918971, C15320, | |
| | | | | | W93273, F00607, | |
| | | | | | AI823928, T51116, Z19397, | |
| | | | | | T96093, R92414, T51024, | |
| | | | | | AI422647, AI216344, | |
| | | | | | AI741425, AI936703, | |
| | | | | | R17362, T96094, R42713, | |
| | | | | | AI869077, F00114, C00216, | |
| | | | | | Z66165, Z56024, and | |
| | | | | | AW662096. | |
| HBODA38 | 153 | 923456 | 1-1882 | 15-1896 | AA196401, W79841, | |
| | | | | | AA112831, AA197134, | |
| | | | | | C05212, W19681, | |
| | | | | | AA195812, Z25012, | |
| | | | | | AI004215, Z30134, | |
| | | | | | AA194641, AI809925, | |
| | | | | | AA258550, Z28480, | |
| | | | | | F29133, AA699576, | |
| | | | | | F20387, AI129717, | |
| | | | | | AA194359, AI079487, | |
| | | | | | AA195355, AA195094, | |
| | | | | | AA931319, F34387, | |
| | | | | | Z19343, F36761, H67895, | |
| | | | | | AA258604, AI378821, | |
| | | | | | F19321, AI089231, R91150, | |
| | | | | | AI702453, AI288969, | |
| | | | | | AI313118, AI351843, | |
| | | | | | F31038, N56278, AI381419, | |
| | | | | | AA195356, AA131264, | |
| | | | | | AA195051, AA192095, | |
| | | | | | AI264911, and AA086284. | |
| HCYBK19 | 154 | 925494 | 1-2664 | 15-2678 | AI829726, AI809562, | |
| | | | | | AI927757, AI927758, | |
| | | | | | AI927768, AW297770, | |
| | | | | | AA165336, AI638072, | |
| | | | | | AI149852, AW298053, | |
| | | | | | AI365991, AA904547, | |
| | | | | | H15885, AA985065, | |
| | | | | | AI359235, AW207262, | |
| | | | | | AI470080, AI421572, | |
| | | | | | AA305419, AA985170, | |
| | | | | | AW341104, AI423550, | |
| | | | | | AI362528, AI453702, | |
| | | | | | AI654827, AA927292, | |
| | | | | | H91991, AI365149, | |
| | | | | | AI365324, D81295, | |
| | | | | | AI797740, AI357382, | |
| | | | | | AI953516, AA909430, | |
| | | | | | H01576, AA969956, | |
| | | | | | AA379840, H52748, | |
| | | | | | R37302, AA905264, | |
| | | | | | Z43289, R62753, R18887, | |
| | | | | | R68272, H04859, | |
| | | | | | AA746048, T31617, | |
| | | | | | H04764, T78758, Z44077, | |
| | | | | | T32807, D60323, | |
| | | | | | AA634475, H01477, | |
| | | | | | AI193962, H00918, D81446, | |
| | | | | | M86147, AA983881, | |
| | | | | | AA318875, N64328, | |
| | | | | | AA165369, Z39361, | |
| | | | | | D62629, T16370, F03272, | |
| | | | | | H00919, N34301, and | |
| | | | | | H46107. | |
| HOFNH30 | 155 | 928365 | 1-362 | 15-376 | AF186380, and AF127138. | |
| HFXED03 | 156 | 1136469 | 1-1594 | 15-1608 | AI640298, AI984640, | |
| | | | | | AI927459, AI492589, | |
| | | | | | AA037170, AA985228, | |
| | | | | | R59151, M86008, | |
| | | | | | AI539361, AA480185, | |
| | | | | | W25874, AW070463, | |
| | | | | | T35581, AA354520, | |
| | | | | | Z20600, AA853067, | |
| | | | | | AA151003, AA374936, | |
| | | | | | AA374649, AI693470, | |
| | | | | | W81208, AI765122, | |
| | | | | | AI970100, AA332604, | |
| | | | | | AI129029, AI373608, | |
| | | | | | F06971, F06054, | |
| | | | | | AA446917, H04913, | |
| | | | | | AA853066, AR035972, | |
| | | | | | AL110300, and A75455. | |
| HWMEV63 | 157 | 931154 | 1-440 | 15-454 | D13626, and AC078816. | |
| HWHGT26 | 158 | 1147962 | 1-2634 | 15-2648 | AA829643, D82406, | |
| | | | | | AW339052, Z36241, | |
| | | | | | AA885340, H66744, | |
| | | | | | AW440614, H85794, | |
| | | | | | H96697, AW105208, | |
| | | | | | H12642, AA282102, | |
| | | | | | Z25297, AA281700, | |
| | | | | | AA292399, H86205, | |
| | | | | | N58359, AA548845, | |
| | | | | | H72231, AA938721, | |
| | | | | | H58538, AA333403, | |
| | | | | | H12593, AA568870, | |
| | | | | | AA281638, Z28896, | |
| | | | | | AA282103, H86563, | |
| | | | | | AA418431, H84902, | |
| | | | | | AI685214, H71667, | |
| | | | | | AW075858, AA298135, | |
| | | | | | H66743, AA653194, | |
| | | | | | L34968, AF065392, | |
| | | | | | AF013966, AF065391, | |
| | | | | | AF013965, AF013967, and | |
| | | | | | AF133818. | |
| HBXBG65 | 159 | 932780 | 1-521 | 15-535 | R36281, AF094480, and | |
| | | | | | AF094479. | |
| HSDHB12 | 160 | 941973 | 1-624 | 15-638 | AA447298. | |
| HLWAR77 | 161 | 947484 | 1-1275 | 15-1289 | AA449919, AA449920, and | |
| | | | | | AF119815. | |
| HTTJQ27 | 162 | 1182680 | 1-1043 | 15-1057 | AA522440, AI683658, | |
| | | | | | AA527385, AW068809, | |
| | | | | | AI567764, AI962065, | |
| | | | | | H61360, AI962103, | |
| | | | | | AA811386, AW188595, | |
| | | | | | AW194232, AI953393, | |
| | | | | | AI868180, AI470299, | |
| | | | | | AI241678, AW074057, and | |
| | | | | | AL050280. | |
| HUJDA09 | 163 | 1153887 | 1-767 | 15-781 | AI133670, W26633, | |
| | | | | | AW375605, AA318069, | |
| | | | | | AA853744, AI174232, | |
| | | | | | AA521255, AA024888, | |
| | | | | | N46555, R58116, | |
| | | | | | AA447471, H77993, | |
| | | | | | R58328, T47555, AI205304, | |
| | | | | | T81235, W25885, R33242, | |
| | | | | | AA349799, Z20968, | |
| | | | | | AA206898, AW380305, | |
| | | | | | AA852419, AA355036, | |
| | | | | | AW352357, AA486937, | |
| | | | | | T80568, AA350303, | |
| | | | | | AW138906, AA533322, | |
| | | | | | W22449, AI372724, | |
| | | | | | AI751908, AL133628, | |
| | | | | | AF124440, AJ133038, and | |
| | | | | | AB029448. | |
| HEOST94 | 164 | 954582 | 1-634 | 15-648 | AA243527, AL133847, | |
| | | | | | AW070995, R50115, | |
| | | | | | H17151, H11956, | |
| | | | | | AW245691, W81176, | |
| | | | | | AA324883, AA134693, | |
| | | | | | AA322031, Z43085, | |
| | | | | | AI908431, H10325, | |
| | | | | | AB007857, AC021705, | |
| | | | | | AC021705, and AC006435. | |
| HUVHQ75 | 165 | 955032 | 1-620 | 15-634 | M86008, T35581, Z20600, | |
| | | | | | AI693470, AL110300, | |
| | | | | | AR035972, and A75455. | |
| HWAGC08 | 166 | 1189787 | 1-1417 | 15-1431 | AA133439, AI150395, | |
| | | | | | AI394694, AA836507, | |
| | | | | | AI904808, AA133438, | |
| | | | | | AA055801, AI216678, | |
| | | | | | AA482998, AA055852, | |
| | | | | | AA447236, AL048981, and | |
| | | | | | AC005071. | |
| HMWJI52 | 167 | 1202746 | 1-2713 | 15-2727 | AI659483, AI857996, | |
| | | | | | AI745593, N63916, | |
| | | | | | AA541651, AI858011, | |
| | | | | | N63903, AA573858, | |
| | | | | | AW149456, AW150971, | |
| | | | | | AW172771, N53446, | |
| | | | | | AI568454, AA857892, | |
| | | | | | AA532378, AI185005, | |
| | | | | | AI040894, AI740569, | |
| | | | | | AA876133, AA677515, | |
| | | | | | AI057543, AA865457, | |
| | | | | | AI151432, AI095739, | |
| | | | | | AA425718, AL118870, | |
| | | | | | AW188153, AI383493, | |
| | | | | | AA879134, AI093353, | |
| | | | | | AI970686, AA973591, | |
| | | | | | AA918313, AA708914, | |
| | | | | | AW129493, AI271887, | |
| | | | | | AI016698, AI093351, | |
| | | | | | AW363695, AA682557, | |
| | | | | | AA586346, AA115282, | |
| | | | | | AW189896, AA426545, | |
| | | | | | AA738302, AI139340, | |
| | | | | | AA834075, AW363660, | |
| | | | | | AA158540, AA291139, | |
| | | | | | AI299505, AI672698, | |
| | | | | | AI025591, AA705475, | |
| | | | | | AA115260, AI360357, | |
| | | | | | AI927241, AI348355, | |
| | | | | | N98443, AI537223, N98274, | |
| | | | | | AA741220, AA835860, | |
| | | | | | AA291762, N25158, | |
| | | | | | AA460612, W69122, | |
| | | | | | D81559, H63158, AI246009, | |
| | | | | | H15065, T17447, R26864, | |
| | | | | | AA974875, D52505, | |
| | | | | | N95190, AI271787, | |
| | | | | | AA721273, H16393, | |
| | | | | | AW149360, AA135600, | |
| | | | | | AI245518, AA135540, | |
| | | | | | AA806170, AI187006, | |
| | | | | | AA316474, T15919, | |
| | | | | | AI272340, AA290769, | |
| | | | | | H08014, H54356, Z38773, | |
| | | | | | R94384, R50814, H63074, | |
| | | | | | H59564, H14744, | |
| | | | | | AA213527, AA724344, | |
| | | | | | AA743446, H84049, | |
| | | | | | AA917576, H19010, | |
| | | | | | N92062, H19306, H07918, | |
| | | | | | D61231, H54277, | |
| | | | | | AA767619, AW118549, | |
| | | | | | AA766172, N68849, | |
| | | | | | T30190, AA548822, | |
| | | | | | AA533504, F08853, | |
| | | | | | AA334162, AI203502, | |
| | | | | | F05055, F04359, AI204122, | |
| | | | | | AI537924, Z42850, H84050, | |
| | | | | | N55132, H13528, | |
| | | | | | AA564728, H05319, | |
| | | | | | F11186, F02319, AI368540, | |
| | | | | | H15064, D51046, F04602, | |
| | | | | | R26718, H06692, F01594, | |
| | | | | | R94795, AA486318, | |
| | | | | | R44372, R27956, R47421, | |
| | | | | | R27093, H83828, | |
| | | | | | AA740665, AA354950, | |
| | | | | | AA917561, H59565, | |
| | | | | | AA995419, R14815, | |
| | | | | | D19736, AI302335, R43854, | |
| | | | | | R94714, R26942, R40121, | |
| | | | | | H06693, R24567, Z42594, | |
| | | | | | AA705980, AA342628, | |
| | | | | | N72449, R27965, | |
| | | | | | AW295138, Z42064, | |
| | | | | | AI090231, F08378, | |
| | | | | | AI381196, T27000, D56273, | |
| | | | | | AA486216, R35155, | |
| | | | | | AA214543, W24591, | |
| | | | | | D59997, AA059019; | |
| | | | | | AA948086, Z78361, | |
| | | | | | T27001, AA158539, | |
| | | | | | H05373, H86329, Z45494, | |
| | | | | | AA938906, AA702132, | |
| | | | | | AA300225, Z57544, | |
| | | | | | Z59851, Z59832, Z59966, | |
| | | | | | H98637, AW470568, | |
| | | | | | AW513873, AW591435, | |
| | | | | | and AW769993. | |
| HAABH11 | 168 | 1199572 | 1-851 | 15-865 | AI418830, AA424650, | |
| | | | | | N25267, AW026561, | |
| | | | | | AI126772, H83701, N22732, | |
| | | | | | AA631750, AA418447, | |
| | | | | | AA759336, AI250627, | |
| | | | | | AI251221, AI494201, | |
| | | | | | AI521005, AI472536, | |
| | | | | | AI540606, AI633300, | |
| | | | | | AI401697, AI687568, | |
| | | | | | AI633061, AW059713, | |
| | | | | | AL046933, AI446373, | |
| | | | | | N29277, AI261589, | |
| | | | | | AW167157, AI799540, | |
| | | | | | AW162194, AA903067, | |
| | | | | | AL038605, AI537837, | |
| | | | | | AI446515, AI702527, | |
| | | | | | AI916419, AW168503, | |
| | | | | | AA948318, AI804505, | |
| | | | | | AI491904, AI468959, | |
| | | | | | AI573026, AI933992, | |
| | | | | | AI432570, AW024921, | |
| | | | | | AI267185, AI537643, | |
| | | | | | N25033, AI284060, | |
| | | | | | AI345688, AI678875, | |
| | | | | | AI453328, AI377001, | |
| | | | | | AW081383, AI340726, | |
| | | | | | AL119511, AI560545, | |
| | | | | | AW411359, AI434731, | |
| | | | | | AI583578, AW161202, | |
| | | | | | H89138, AW081186, | |
| | | | | | AI560679, AI636619, | |
| | | | | | AI696583, AI628325, | |
| | | | | | AI584118, AI288843, | |
| | | | | | AI590423, AI679550, | |
| | | | | | AA848053, AI690706, | |
| | | | | | AI702065, AW193467, | |
| | | | | | T49776, AI810544, | |
| | | | | | AI582871, AI623736, | |
| | | | | | AI567540, AI345567, | |
| | | | | | AI890533, AW081234, | |
| | | | | | AI282031, AI659795, | |
| | | | | | AI698401, AI445588, | |
| | | | | | AI349957, AW172723, | |
| | | | | | AI242736, AI285514, | |
| | | | | | AI274614, AA729017, | |
| | | | | | AI345005, AI636788, | |
| | | | | | AL040586, AW152182, | |
| | | | | | AA088789, AI802372, | |
| | | | | | AI828734, AI336633, | |
| | | | | | AI357599, AW022682, | |
| | | | | | AI866461, AI559863, | |
| | | | | | AI344931, AI338060, | |
| | | | | | AI559752, AW262565, | |
| | | | | | AW366372, AI921092, | |
| | | | | | AW148589, AI539800, | |
| | | | | | AL046942, AA503384, | |
| | | | | | AI656270, AI815915, | |
| | | | | | AI287449, AI250646, | |
| | | | | | T99953, AI247306, | |
| | | | | | AI952914, AI373622, | |
| | | | | | AI471282, AL048644, | |
| | | | | | AW082532, AI922110, | |
| | | | | | N29481, AI811603, | |
| | | | | | AI890051, AI355277, | |
| | | | | | AI310709, AW196299, | |
| | | | | | AI814218, AI538850, | |
| | | | | | AI634251, AI819663, | |
| | | | | | AW021373, AI624120, | |
| | | | | | AI284131, AI860652, | |
| | | | | | AI829330, AI282326, | |
| | | | | | AW022636, AI263584, | |
| | | | | | AW080076, AW083572, | |
| | | | | | AI824748, AW079315, | |
| | | | | | AI671651, AI365256, | |
| | | | | | AW410850, AI932458, | |
| | | | | | AI554444, AI050666, | |
| | | | | | AA587590, AI829327, | |
| | | | | | AA502794, AW148882, | |
| | | | | | AA070889, AI961403, | |
| | | | | | AI690536, AI270039, | |
| | | | | | AW162189, AI932739, | |
| | | | | | AW189148, AI872423, | |
| | | | | | AI598209, AI537677, | |
| | | | | | N95566, AI955866, | |
| | | | | | AW151926, AI345143, | |
| | | | | | AI479030, AI434038, | |
| | | | | | AW409801, AL119399, | |
| | | | | | AW083168, AI620864, | |
| | | | | | AI868204, AI584130, | |
| | | | | | AL048323, AI765323, | |
| | | | | | AI886022, AI612885, | |
| | | | | | AI434242, AI799189, | |
| | | | | | AI919107, AI571699, | |
| | | | | | AW265004, AI636507, | |
| | | | | | AL048340, AW104062, | |
| | | | | | AW148970, AI962040, | |
| | | | | | AW237096, AI473451, | |
| | | | | | AI307505, AI582932, | |
| | | | | | AA580663, AI570056, | |
| | | | | | AI161016, AW263804, | |
| | | | | | AW194014, AI690813, | |
| | | | | | AI370392, AI281867, | |
| | | | | | AW191844, AI888621, | |
| | | | | | AI691088, AI274655, | |
| | | | | | AI469516, AW079334, | |
| | | | | | AA808175, AI287476, | |
| | | | | | AW161098, AI949968, | |
| | | | | | AI345014, AI589428, | |
| | | | | | AI355017, AI926333, | |
| | | | | | AA575874, AI559524, | |
| | | | | | AL049053, AL040449, | |
| | | | | | AI281659, AI203903, | |
| | | | | | AW196075, AI884459, | |
| | | | | | AI440238, AI345224, | |
| | | | | | AI678446, AA928539, | |
| | | | | | N98606, AI915210, | |
| | | | | | AW103923, AI687809, | |
| | | | | | AW129731, AI345253, | |
| | | | | | AI096534, AI289337, | |
| | | | | | AI283143, AI469674, | |
| | | | | | AI818320, AI589218, | |
| | | | | | E12579, I48978, AF146568, | |
| | | | | | AL050138, I89947, A08913, | |
| | | | | | AF098162, A08912, | |
| | | | | | A08910, A08911, A18777, | |
| | | | | | A08909, AF113689, | |
| | | | | | AL080154, A08907, | |
| | | | | | S36676, AL109672, | |
| | | | | | AF067728, A08908, | |
| | | | | | AF111851, AF153205, | |
| | | | | | S76508, AF119337, | |
| | | | | | U77594, U49434, L13297, | |
| | | | | | S77771, I89931, AF113013, | |
| | | | | | I49625, AR038854, | |
| | | | | | AL137547, I89934, | |
| | | | | | AL137271, U57715, | |
| | | | | | Y13350, AL133062, | |
| | | | | | AF047716, AR068466, | |
| | | | | | E12580, AF112208, | |
| | | | | | AF079765, AL137665, | |
| | | | | | AF115410, Z82022, | |
| | | | | | AF183393, U57352, | |
| | | | | | AF081571, AL080137, | |
| | | | | | AL133619, AL133072, | |
| | | | | | U49908, AL133623, | |
| | | | | | AF113019, AF017152, | |
| | | | | | E15582, AL110221, | |
| | | | | | A08916, A15345, | |
| | | | | | AF085809, S54890, | |
| | | | | | AL117648, AF114170, | |
| | | | | | I33391, AL049382, I42402, | |
| | | | | | AF143957, AF114818, | |
| | | | | | AL080127, X57084, J05277, | |
| | | | | | AF104032, I89944, I48979, | |
| | | | | | AF162270, Y11587, | |
| | | | | | D89079, AF094480, | |
| | | | | | AF158248, X67813, | |
| | | | | | AL050092, AF061573, | |
| | | | | | Y08769, E02914, S61953, | |
| | | | | | L04849, AF003737, L04852, | |
| | | | | | AR009628, AF067420, | |
| | | | | | A45787, AR068182, | |
| | | | | | AF182215, Y14314, | |
| | | | | | AL080124, A32826, | |
| | | | | | A30330, A32827, A30331, | |
| | | | | | X98066, AF012536, | |
| | | | | | AF036941, X99257, | |
| | | | | | AL133070, AL049460, | |
| | | | | | X52128, AL122045, | |
| | | | | | AL137705, AL080074, | |
| | | | | | X93495, AF113691, | |
| | | | | | AF167995, A57389, | |
| | | | | | AF100931, AL137526, | |
| | | | | | AL133093, U92068, | |
| | | | | | U76419, A83556, | |
| | | | | | AF118092, AL122111, | |
| | | | | | AB025103, AF159615, | |
| | | | | | AL137554, J05032, E08631, | |
| | | | | | AF036268, AL080140, | |
| | | | | | AF015958, S68736, | |
| | | | | | AL137530, X66975, | |
| | | | | | AL050393, AL137555, | |
| | | | | | AL110222, E01614, | |
| | | | | | E13364, X62773, | |
| | | | | | AL050366, E15569, | |
| | | | | | AC004227, S78214, | |
| | | | | | AC004822, AL137539, | |
| | | | | | U75932, S83456, AJ001838, | |
| | | | | | AF090934, Y16645, | |
| | | | | | X79812, AL110196, | |
| | | | | | AL137640, X83544, | |
| | | | | | AF118090, AL080110, | |
| | | | | | AF017790, AL117649, | |
| | | | | | AF047443, U37359, | |
| | | | | | AF113676, AL137533, | |
| | | | | | AF039138, AF039137, | |
| | | | | | AF044323, AL137488, | |
| | | | | | S79832, E06743, X65873, | |
| | | | | | AL133049, AF022363, | |
| | | | | | X99226, X53587, | |
| | | | | | AC002382, I29004, X66417, | |
| | | | | | AF077051, AF078844, | |
| | | | | | S75997, AL133054, L10353, | |
| | | | | | AL049464, A07588, | |
| | | | | | U89906, AL050277, | |
| | | | | | A77033, A77035, | |
| | | | | | AL117587, U58996, | |
| | | | | | X89102, D00174, | |
| | | | | | AF111849, AL117460, | |
| | | | | | AF126488, AL080139, | |
| | | | | | E01314, U96683, | |
| | | | | | AF058921, A08915, | |
| | | | | | AL137256, AL137558, | |
| | | | | | I66342, AL117440, | |
| | | | | | AJ010277, AL137658, | |
| | | | | | AL133014, U80742, | |
| | | | | | AL080126, E02221, | |
| | | | | | A21101, M80340, | |
| | | | | | AC004200, E02152, | |
| | | | | | AF106945, AF169154, | |
| | | | | | AF013214, AL122049, | |
| | | | | | AR068753, X56039, | |
| | | | | | A41575, A65341, I18355, | |
| | | | | | AF065135, A76337, | |
| | | | | | AL133640, I34392, | |
| | | | | | AF076633, AF200464, | |
| | | | | | AJ242859, AR038969, | |
| | | | | | A27171, AF004162, | |
| | | | | | Y14634, I03321, A12297, | |
| | | | | | AJ012582, AL137641, | |
| | | | | | U36585, AL137292, | |
| | | | | | U89295, I68732, A17115, | |
| | | | | | A18079, X72387, Z49258, | |
| | | | | | AL137463, X97332, I41145, | |
| | | | | | AF118064, I09360, and | |
| | | | | | AF118070. | |
| HAPAI15 | 169 | 1187435 | 1-1617 | 15-1631 | AW402614, AA662103, | |
| | | | | | AI929056, AW409948, | |
| | | | | | AA311813, AA310195, | |
| | | | | | AI816311, AW294565, | |
| | | | | | AA976304, AA731168, | |
| | | | | | AA251463, AA205378, | |
| | | | | | AA805414, AA053460, | |
| | | | | | AW401973, AA312734, | |
| | | | | | W23120, AA195341, | |
| | | | | | AA352713, AA195340, | |
| | | | | | AA662069, AA317160, | |
| | | | | | AA354224, T85806, | |
| | | | | | AI762990, AA297895, | |
| | | | | | AA356611, AA315788, | |
| | | | | | AA281670, AA283373, | |
| | | | | | T93968, Z21401, D53904, | |
| | | | | | D53947, T89686, T89509, | |
| | | | | | AA053212, AA448152, | |
| | | | | | D50918, AB023622, and | |
| | | | | | AC004913. | |
| HNGBQ66 | 170 | 1172819 | 1-1046 | 15-1060 | AW239349, AA375315, | |
| | | | | | AW151247, AA355780, | |
| | | | | | AI452836, AL036896, | |
| | | | | | AI801563, AA584241, | |
| | | | | | AA493546, AI620354, | |
| | | | | | AI360521, AW275432, | |
| | | | | | AW117860, AL041375, | |
| | | | | | AA630476, N92588, | |
| | | | | | R23873, AI224583, | z |
| | | | | | AW272389, AI473671, | |
| | | | | | AI797998, N67313, | |
| | | | | | AL044701, AI308529, | |
| | | | | | T03928, AI889995, | |
| | | | | | AI049999, AI267285, | |
| | | | | | AI355246, AI734193, | |
| | | | | | AA455202, AW327852, | |
| | | | | | AA666295, AA676592, | |
| | | | | | AI653776, AW264548, | |
| | | | | | AI761677, AA809125, | |
| | | | | | AW021674, AI288033, | |
| | | | | | AA526508, H71678, | |
| | | | | | AA507623, AW177869, | |
| | | | | | AI732682, AW072963, | |
| | | | | | AW082104, AI734158, | |
| | | | | | H60912, AA814503, | |
| | | | | | AA629759, AA493789, | |
| | | | | | H38769, AI798041, | |
| | | | | | AA584207, AW117704, | |
| | | | | | AA526413, AW239465, | |
| | | | | | AW008184, AI188049, | |
| | | | | | AI336771, AA558488, | |
| | | | | | AW301483, AA199578, | |
| | | | | | AI921706, AA594742, | |
| | | | | | AI567676, AI872229, | |
| | | | | | AI090377, AI310670, | |
| | | | | | AA629713, AL036949, | |
| | | | | | AI590404, AA533660, | |
| | | | | | AI369076, AA658443, | |
| | | | | | AA846923, AA226356, | |
| | | | | | F35684, AI174703, | |
| | | | | | AI791426, AI732473, | |
| | | | | | AI283938, AA225392, | |
| | | | | | AI469599, AI349130, | |
| | | | | | AI031759, AA804726, | |
| | | | | | AI924950, AI683079, | |
| | | | | | AI613459, AI309943, | |
| | | | | | AA457592, AL117554, | |
| | | | | | AC005049, AF205588, | |
| | | | | | AC005215, AL035659, | |
| | | | | | AC003663, AL035413, | |
| | | | | | AC004099, AL096791, | |
| | | | | | AC006544, AF126403, | |
| | | | | | AC005500, AC005516, | |
| | | | | | AC007066, AC004913, | |
| | | | | | AB001523, AC005730, | |
| | | | | | AL035086, AP001052, | |
| | | | | | AC007934, AC002310, | |
| | | | | | AL080243, AF207550, | |
| | | | | | AL034420, AC002544, | |
| | | | | | AC004491, AL021391, | |
| | | | | | Z95118, AC005391, | |
| | | | | | AC007685, Z82179, | |
| | | | | | AC005746, AF064861, | |
| | | | | | AC018633, AC002316, | |
| | | | | | AP000501, AC005529, | |
| | | | | | AL022326, AL022318, | |
| | | | | | AC005602, AF109907, | |
| | | | | | U65896, AL031848, | |
| | | | | | AC004859, AC005944, | |
| | | | | | AL031427, AC007955, | |
| | | | | | AC004755, AC005913, | |
| | | | | | AC005921, M89651, | |
| | | | | | AF038458, AL049856, | |
| | | | | | AC005088, AC005535, | |
| | | | | | AB023048, AC004675, | |
| | | | | | AC004816, AL009172, | |
| | | | | | AC005933, AC000115, | |
| | | | | | AC005899, Z84466, | |
| | | | | | AC007226, AF088219, | |
| | | | | | Z97632, AC004797, | |
| | | | | | Z99716, L47234, | |
| | | | | | AC006059, AP000503, | |
| | | | | | AC005578, AF030453, | |
| | | | | | AC005231, AL021453, | |
| | | | | | AC002365, AC004263, | |
| | | | | | AF023268, AB000882, | |
| | | | | | AC005914, AC004149, | |
| | | | | | AC005081, AL035455, | |
| | | | | | AC006236, AL031255, | |
| | | | | | AC006011, AC005527, | |
| | | | | | AC005544, Z95116, | |
| | | | | | AL133448, AL031587, | |
| | | | | | AC004973, AL096701, | |
| | | | | | AL136295, L78810, | |
| | | | | | AP000045, AL031282, | |
| | | | | | U89335, AC004000, | |
| | | | | | Z99128, AC006539, | |
| | | | | | AL049697, AC007308, | |
| | | | | | AC001231, AC019014, | |
| | | | | | AC004882, AL049646, | |
| | | | | | AC007382, AC004583, | |
| | | | | | AP000356, U96409, | |
| | | | | | AC007021, Z99291, | |
| | | | | | AC005069, AC006479, | |
| | | | | | AC003030, AC004686, | |
| | | | | | AP000300, AC006084, | |
| | | | | | AC005253, L78833, | |
| | | | | | AC005553, AJ246003, | |
| | | | | | AC006211, Z84480, | |
| | | | | | AP000228, AC007773, | |
| | | | | | AC004655, U91328, | |
| | | | | | AC004673, AL022311, | |
| | | | | | AL109801, AC004124, | |
| | | | | | AC005523, AC002119, | |
| | | | | | AF060568, AP000279, | |
| | | | | | AF134726, AL035461, | |
| | | | | | AC006468, AL035423, | |
| | | | | | AC004820, AJ003147, | |
| | | | | | AL121603, AC005412, | |
| | | | | | AC003665, Z68284, | |
| | | | | | AC004804, AL021398, | |
| | | | | | AL024498, AC005670, | |
| | | | | | AC007298, AL022316, | |
| | | | | | AL035587, Y18000, | |
| | | | | | AL109963, AL031678, | |
| | | | | | U91318, AB000931, | |
| | | | | | AC005186, AC005325, | |
| | | | | | AC005828, AL139054, | |
| | | | | | AC005763, AC002350, | |
| | | | | | AC004876, AC005666, | |
| | | | | | AL049569, AC006026, | |
| | | | | | AC002477, Z97056, | |
| | | | | | AP000140, AC004812, | |
| | | | | | AC002400, AC005067, | |
| | | | | | AC005512, AC000394, | |
| | | | | | Z85986, AC004878, | |
| | | | | | AC005874, AF134471, | |
| | | | | | AC004692, AL049694, | |
| | | | | | AP000113, AC004638, | |
| | | | | | AL033392, Z69721, | |
| | | | | | AC007687, AC006480, | |
| | | | | | AC007731, AL031281, | |
| | | | | | AP000106, AP000038, | |
| | | | | | AC004771, AC005300, | |
| | | | | | AC004552, AC006162, | |
| | | | | | Z83840, AC005082, | |
| | | | | | AC005587, AC006077, | |
| | | | | | U47924, AC010205, | |
| | | | | | AL050312, AC006039, | |
| | | | | | AC005379, AL008582, | |
| | | | | | AP000512, AC006538, | |
| | | | | | AL121652, AP000694, | |
| | | | | | AP000692, Z95115, | |
| | | | | | AC005005, AC006205, | |
| | | | | | AP000689, AC004477, | |
| | | | | | Z98743, AC004858, | |
| | | | | | AJ229041, AL021806, | |
| | | | | | AF015416, AC002395, | |
| | | | | | AC005280, AL035405, | |
| | | | | | AC002558, AC005071, | |
| | | | | | AC005207, AL034417, | |
| | | | | | AL049540, AP000359, | |
| | | | | | AP000039, AD000812, | |
| | | | | | Z83844, AR036572, | |
| | | | | | AC006536, Z93017, | |
| | | | | | AL021917, AC007390, | |
| | | | | | AC007263, AP000280, | |
| | | | | | AC007041, AC004031, | |
| | | | | | AC020663, AC006581, | |
| | | | | | AL031133, AF011889, and | |
| | | | | | AC004167. | |
| HTXPY09 | 171 | 981988 | 1-1145 | 15-1159 | AI435592, U56656, | |
| | | | | | AA148805, AA046175, | |
| | | | | | AA075198, AF194371, | |
| | | | | | AF069782, AF053232, | |
| | | | | | AF161469, AL117554, and | |
| | | | | | AF123534. | |
| HCFLJ17 | 172 | 1193629 | 1-1769 | 15-1783 | AW148724, AW236350, | |
| | | | | | AW058251, AW363242, | |
| | | | | | C75194, AA773368, | |
| | | | | | AA152132, AA313387, | |
| | | | | | AA047345, AL121232, | |
| | | | | | W38779, T39704, | |
| | | | | | AA404974, AA377300, | |
| | | | | | AA047344, AI050068, | |
| | | | | | AI633499, AW363273, | |
| | | | | | AA362228, AA121624, | |
| | | | | | AA247511, AW029375, | |
| | | | | | T40740, AW392857, | |
| | | | | | W07426, D51246, | |
| | | | | | AA173649, AF155096, | |
| | | | | | AF135439, and AW769129. | |
| HGOCA12 | 173 | 1172054 | 1-1234 | 15-1248 | AW444890, AA461185, | |
| | | | | | AA435513, AA602372, | |
| | | | | | AA723271, AA774585, | |
| | | | | | AI971328, AI004443, | |
| | | | | | W72923, F36785, F17742, | |
| | | | | | F19634, W94217, | |
| | | | | | AA346094, AA346095, | |
| | | | | | F24441, AA393548, | |
| | | | | | AA461361, and AB027004. | |
| HCE5E94 | 174 | 1070802 | 1-1465 | 15-1479 | AI142098, AI061467, | |
| | | | | | AA555087, AI816028, | |
| | | | | | AI064696, AI132975, | |
| | | | | | AI955216, AI954923, | |
| | | | | | AI185092, AI961492, | |
| | | | | | AA557261, AA594123, | |
| | | | | | AI683136, AI821060, | |
| | | | | | AA167739, AI492571, | |
| | | | | | AA167833, AI128382, | |
| | | | | | AI039982, AI801532, | |
| | | | | | AI884567, AI708278, | |
| | | | | | AA877359, AA771931, | |
| | | | | | AI225219, AW169567, | |
| | | | | | AW149057, W02976, | |
| | | | | | AA570678, AA847293, | |
| | | | | | AA738472, AI916354, | |
| | | | | | AI568477, AI687057, | |
| | | | | | AA570139, AA485692, | |
| | | | | | AI075416, AW025307, | |
| | | | | | AA009525, AI870831, | |
| | | | | | N79600, AA524522, | |
| | | | | | AA128450, AA447933, | |
| | | | | | AA084924, AI733764, | |
| | | | | | W19067, AI630317, | |
| | | | | | AA972196, AA037503, | |
| | | | | | AA113991, AA614719, | |
| | | | | | AA112786, AI191141, | |
| | | | | | AI815873, W28377, | |
| | | | | | AA846646, AA037371, | |
| | | | | | AA165667, R36946, | |
| | | | | | AA583651, AL134404, | |
| | | | | | AI354274, AI436348, | |
| | | | | | AA729500, AW169930, | |
| | | | | | AI288012, H08475, F28921, | |
| | | | | | AA224339, H09582, | |
| | | | | | N72263, Z40082, M79262, | |
| | | | | | AA854626, AI582426, | |
| | | | | | AA485823, AA857288, | |
| | | | | | AI811622, T53473, R51376, | |
| | | | | | AA085027, AA165631, | |
| | | | | | C20581, H67335, T53474, | |
| | | | | | F04102, AA009524, | |
| | | | | | N28590, H53206, | |
| | | | | | AA086264, AA322093, | |
| | | | | | H08757, AI868288, F37189, | |
| | | | | | R43209, R11825, | |
| | | | | | AA113990, AA372866, | |
| | | | | | AI203752, N67107, H09038, | |
| | | | | | F04097, R17117, N87606, | |
| | | | | | AA365003, R95092, | |
| | | | | | AA088569, AW027974, | |
| | | | | | AA764799, AI474701, | |
| | | | | | AA170849, AA224133, | |
| | | | | | AA886226, AA366031, | |
| | | | | | AI572914, AA903493, | |
| | | | | | AA748748, AF087661, | |
| | | | | | AA076638, AA916592, | |
| | | | | | AI088936, AI089690, | |
| | | | | | AA447640, AA448044, | |
| | | | | | AI014970, AI362134, | |
| | | | | | AI432519, AI471047, | |
| | | | | | AI681970, AI969201, | |
| | | | | | AW475066, and | |
| | | | | | AW517258. | |
| HNTAV78 | 175 | 971315 | 1-528 | 15-542 | | |
| HHEEL28 | 176 | 1216492 | 1-1918 | 15-1932 | AW138424, AA831257, | |
| | | | | | AI801844, AI028474, | |
| | | | | | AI692891, AA767936, | |
| | | | | | AW188936, AI648511, | |
| | | | | | AA359127, AI970093, | |
| | | | | | AI381789, AI364659, | |
| | | | | | AI697316, AA358752, | |
| | | | | | AA320236, AW440942, | |
| | | | | | AI819663, AL079799, | |
| | | | | | AI264299, AI685087, | |
| | | | | | N29277, AL134832, | |
| | | | | | AI963625, AI539260, | |
| | | | | | AI349012, AI401697, | |
| | | | | | AW188525, AW020397, | |
| | | | | | AW020561, AL039011, | |
| | | | | | AI333104, AW129148, | |
| | | | | | AW167918, AI336575, | |
| | | | | | AI687568, AW051088, | |
| | | | | | AW080076, AW148970, | |
| | | | | | AI250627, AI539690, | |
| | | | | | AL119399, AI434731, | |
| | | | | | AL036954, AI433611, | |
| | | | | | AI538055, AL037454, | |
| | | | | | N75779, AW020328, | |
| | | | | | AW301344, AI884318, | |
| | | | | | AI690620, AI318603, | |
| | | | | | AW170725, AA808175, | |
| | | | | | AI419826, AI890576, | |
| | | | | | AW303152, AI537643, | |
| | | | | | AL119511, AI559558, | |
| | | | | | AI538805, AI345778, | |
| | | | | | AI440294, AW028416, | |
| | | | | | AI889372, AA903106, | |
| | | | | | AW023859, AW195253, | |
| | | | | | AW162315, AW163554, | |
| | | | | | AI500061, AI925685, | |
| | | | | | AA830396, AI890223, | |
| | | | | | AI368579, AI560545, | |
| | | | | | AI680369, AW080290, | |
| | | | | | AW024793, AA761557, | |
| | | | | | AI561356, AA737649, | |
| | | | | | AI540606, AW021662, | |
| | | | | | AI469516, AI050881, | |
| | | | | | AI284060, AI374987, | |
| | | | | | AW074057, AA693331, | |
| | | | | | AI554245, AI537677, | |
| | | | | | AI538028, AW020592, | |
| | | | | | AI225000, AI621341, | |
| | | | | | AL038076, AW160376, | |
| | | | | | AI698391, AW022494, | |
| | | | | | AL041331, AW020288, | |
| | | | | | N25033, AI540458, | |
| | | | | | AI582932, AI289310, | |
| | | | | | AI289791, AL118620, | |
| | | | | | AL036705, AI685080, | |
| | | | | | AA284380, N81195, | |
| | | | | | AW161202, AW020381, | |
| | | | | | AI927233, AW079432, | |
| | | | | | AI589428, AI697464, | |
| | | | | | AI625226, AI654258, | |
| | | | | | AA001397, R41605, | |
| | | | | | AW020693, AW025279, | |
| | | | | | AL046466, AI590043, | |
| | | | | | AI638644, AW130362, | |
| | | | | | AI783569, AI628325, | |
| | | | | | AI440238, AW327693, | |
| | | | | | AW193467, AI887430, | |
| | | | | | AI263584, AA743354, | |
| | | | | | AI473536, AI344935, | |
| | | | | | AA761573, AW008737, | |
| | | | | | AI582966, AI866465, | |
| | | | | | AI613038, AL046454, | |
| | | | | | AI564259, AL045619, | |
| | | | | | AI469764, AL046618, | |
| | | | | | AI432570, AI261589, | |
| | | | | | AW088628, AW020095, | |
| | | | | | AI348897, AI345688, | |
| | | | | | AW172982, AI699823, | |
| | | | | | AW089844, AI815239, | |
| | | | | | AI539847, AI524654, | |
| | | | | | AL045413, AW268293, | |
| | | | | | AA975952, AI863241, | |
| | | | | | AI608936, AI628015, | |
| | | | | | AL040241, AW089006, | |
| | | | | | AI345415, AI798456, | |
| | | | | | R20540, AW020710, | |
| | | | | | AW075382, N98597, | |
| | | | | | AI282669, AW021717, | |
| | | | | | AI582912, AW083572, | |
| | | | | | AW263709, AI567866, | |
| | | | | | AL118781, AI584130, | |
| | | | | | AA678484, AW117675, | |
| | | | | | AI919500, AI680467, | |
| | | | | | AA508692, AW072413, | |
| | | | | | AL041996, AI866469, | |
| | | | | | AI799189, AI280607, | |
| | | | | | AW194185, AA947065, | |
| | | | | | AI336565, AI452560, | |
| | | | | | AI885949, AI049733, | |
| | | | | | AI334893, AI004911, | |
| | | | | | AI491710, AI148113, | |
| | | | | | AW005029, AI114703, | |
| | | | | | AI633314, AI282319, | |
| | | | | | AI868204, AA503384, | |
| | | | | | AI370322, AI612885, | |
| | | | | | AW006032, AL042382, | |
| | | | | | AA693347, AI619820, | |
| | | | | | AI499279, AI610895, | |
| | | | | | AI521005, AI284509, | |
| | | | | | AI289542, AI690948, | |
| | | | | | AI366959, AI309306, | |
| | | | | | AI623662, AI635813, | |
| | | | | | AA857847, AI919600, | |
| | | | | | AI866090, AI523521, | |
| | | | | | AW167083, AA587590, | |
| | | | | | AI624548, AW022682, | |
| | | | | | AI610446, AI610399, | |
| | | | | | AW079699, AL041150, | |
| | | | | | AI355779, AI445877, | |
| | | | | | AW079572, AI370623, | |
| | | | | | AI254226, AI761468, | |
| | | | | | AF047716, E01314, | |
| | | | | | AF061943, AL137271, | |
| | | | | | AL122093, AL117578, | |
| | | | | | I48978, 189947, AJ012582, | |
| | | | | | AL049466, AF015958, | |
| | | | | | X62580, AL133088, | |
| | | | | | AL137258, AL110224, | |
| | | | | | AF055917, AL137294, | |
| | | | | | AL122098, AJ010277, | |
| | | | | | A93350, AL023657, | |
| | | | | | M80340, AF169154, | |
| | | | | | AF120268, S83440, E02221, | |
| | | | | | AR038854, L13297, | |
| | | | | | A07647, AF113019, | |
| | | | | | AR068466, AC004200, | |
| | | | | | A08907, M19658, U77594, | |
| | | | | | AL137267, A58524, | |
| | | | | | AF159148, A58523, | |
| | | | | | AF028823, AL133558, | |
| | | | | | M27260, AF177401, | |
| | | | | | AL137656, I32738, | |
| | | | | | AL049276, X80340, | |
| | | | | | A08910, AF030165, | |
| | | | | | U89295, X72889, E08516, | |
| | | | | | A18777, A08909, | |
| | | | | | AF102166, A08913, | |
| | | | | | AF150103, AL137658, | |
| | | | | | A52563, AF137367, | |
| | | | | | AL137521, AR068753, | |
| | | | | | A08908, AL049339, | |
| | | | | | AF094480, A08912, | |
| | | | | | S69510, AF026008, | |
| | | | | | A08911, L24896, I80062, | |
| | | | | | AL080124, I89931, | |
| | | | | | AF067790, AL137557, | |
| | | | | | X79812, X87582, U92068, | |
| | | | | | S77771, AL110221, | |
| | | | | | AF090886, AL133062, | |
| | | | | | U57352, Y14634, | |
| | | | | | AL137461, AL137479, | |
| | | | | | S68736, I48979, I49625, | |
| | | | | | I41145, X66862, E12580, | |
| | | | | | E12579, AL110225, S76508, | |
| | | | | | D16301, AL137555, | |
| | | | | | X15132, X97332, | |
| | | | | | AL133084, U75370, | |
| | | | | | AL109672, I33392, | |
| | | | | | AF107847, AL050172, | |
| | | | | | AF076633, AF132676, | |
| | | | | | AF017790, AF106657, | |
| | | | | | AL133606, AF124435, | |
| | | | | | Y11587, L04859, I89934, | |
| | | | | | AF061836, AL137463, | |
| | | | | | X84990, E06788, E06790, | |
| | | | | | E06789, AR050959, | |
| | | | | | AF175903, AJ238278, | |
| | | | | | AF151109, AF201468, | |
| | | | | | AL050092, AB030279, | |
| | | | | | X96540, AL110280, | |
| | | | | | U49908, AF115410, I29004, | |
| | | | | | X66417, S54890, | |
| | | | | | AF078844, AL137627, | |
| | | | | | Y10080, AF065135, | |
| | | | | | X66975, X82434, I17544, | |
| | | | | | AL137711, AL133075, | |
| | | | | | X06146, AF199027, | |
| | | | | | AL110222, U79523, | |
| | | | | | AL137550, A23630, | |
| | | | | | AL122110, S75997, | |
| | | | | | AR020905, AF207750, | |
| | | | | | AF017437, AF067728, | |
| | | | | | A65341, AL122050, | |
| | | | | | AL117587, AL137459, | |
| | | | | | AJ006417, AF124728, | |
| | | | | | AF030513, AL050393, | |
| | | | | | AF057300, Z97214, | |
| | | | | | AF057299, X83508, | |
| | | | | | X99226, A70386, | |
| | | | | | AL133560, E12806, | |
| | | | | | AF013214, L40363, | |
| | | | | | AL133067, AR060156, | |
| | | | | | A07588, AF036941, | |
| | | | | | A77033, A77035, | |
| | | | | | AF051325, A76335, | |
| | | | | | AR029490, AF126488, | |
| | | | | | AL096720, AF004162, | |
| | | | | | AL080137, A90832, | |
| | | | | | Y00093, AL137526, | |
| | | | | | AL137716, AF026816, | |
| | | | | | AF106945, AF111112, | |
| | | | | | X98066, AL110196, | |
| | | | | | AL080159, AL117416, | |
| | | | | | X52128, AF153205, | |
| | | | | | U55017, E15324, X67688, | |
| | | | | | AF106697, AL080139, | |
| | | | | | AL050149, L31396, | |
| | | | | | AF158248, AL137254, | |
| | | | | | AF061981, AF090896, | |
| | | | | | U78525, AL050155, | |
| | | | | | AL133619, AL137548, | |
| | | | | | AL049452, L31397, | |
| | | | | | AF114168, AL110199, | |
| | | | | | AL008706, AF113691, | |
| | | | | | A15345, X63410, | |
| | | | | | AF031903, AF100931, | |
| | | | | | AF082526, AL133080, | |
| | | | | | D44497, AF054599, | |
| | | | | | D89079, A59344, Z72491, | |
| | | | | | AF111851, U53505, | |
| | | | | | AB025103, AF176651, and | |
| | | | | | AF200464. | |
| HE8UT58 | 177 | 973153 | 1-1090 | 15-1104 | AL079991, AW409774, | |
| | | | | | AA404732, AA782257, | |
| | | | | | AI808909, AA099036, | |
| | | | | | AA677654, AA405418, | |
| | | | | | AW341107, AW409667, | |
| | | | | | AA659407, AA503263, | |
| | | | | | AI433410, AI885266, | |
| | | | | | AI341147, AA905366, | |
| | | | | | AI692534, AI027623, | |
| | | | | | AA468344, AA923181, | |
| | | | | | AA778251, AI681129, | |
| | | | | | AA533117, AI986154, | |
| | | | | | AA099037, AI955317, | |
| | | | | | AI276678, H29006, | |
| | | | | | AA404602, AI347168, | |
| | | | | | AA371047, AI420387, | |
| | | | | | AW135263, AA868124, | |
| | | | | | T12623, H09118, | |
| | | | | | AA430277, AA365338, | |
| | | | | | T08839, AA813337, | |
| | | | | | H29109, H11272, | |
| | | | | | AW137535, AB014534, | |
| | | | | | AF116574, AF116573, and | |
| | | | | | AC032004. | |
| HIBCN93 | 178 | 1178130 | 1-1492 | 15-1506 | AI056401, AW072652, | |
| | | | | | AI885072, AW205916, | |
| | | | | | AI879122, AI885524, | |
| | | | | | N34233, AI953626, | |
| | | | | | AI768363, AI500165, | |
| | | | | | AI887770, AI651798, | |
| | | | | | AA393235, N35730, | |
| | | | | | AW297174, AI802927, | |
| | | | | | AW271854, R56346, | |
| | | | | | AA249118, AI377463, | |
| | | | | | AW070857, AI824909, | |
| | | | | | N53527, AA948310, | |
| | | | | | AI206861, AA572777, | |
| | | | | | AA570002, AA814424, | |
| | | | | | N25635, AA255602, | |
| | | | | | AI478500, N25539, | |
| | | | | | AA634056, H07018, | |
| | | | | | N28490, AA416965, | |
| | | | | | N34136, N34013, | |
| | | | | | AA902860, AA255576, | |
| | | | | | AW029208, AI690664, | |
| | | | | | AI198003, H99526, H05467, | |
| | | | | | N49189, AI190195, | |
| | | | | | AI864484, N30121, H99763, | |
| | | | | | AI024777, AA379362, | |
| | | | | | AA262183, AI191172, | |
| | | | | | R86778, AA721016, | |
| | | | | | AA350164, R13979, | |
| | | | | | AI963889, AA339761, | |
| | | | | | R17378, N49183, | |
| | | | | | AA262707, T33288, | |
| | | | | | R42616, H99527, T16329, | |
| | | | | | AI423712, AI952318, | |
| | | | | | D62700, AI267479, N92737, | |
| | | | | | W20356, AA385524, | |
| | | | | | T28424, AA370138, | |
| | | | | | AA279758, N24571, | |
| | | | | | R40039, AI351820, | |
| | | | | | AI674497, AA864521, | |
| | | | | | T35226, D57142, R56257, | |
| | | | | | N50244, AI124956, | |
| | | | | | AF143235, and AW628476. | |
| HDPBI30 | 179 | 974711 | 1-2911 | 15-2925 | AA714520, N78665, | |
| | | | | | W15172, AL134531, | |
| | | | | | AA074818, AI251157, | |
| | | | | | AI311635, AA079403, | |
| | | | | | AW130754, AI935943, | |
| | | | | | AF083955, AC005015, | |
| | | | | | AL034423, AP000030, | |
| | | | | | AC002992, AC004216, | |
| | | | | | AC003013, U91321, | |
| | | | | | AC003684, AC002528, | |
| | | | | | AL117258, AL021155, | |
| | | | | | AP000045, AF053356, | |
| | | | | | AL033521, AC004598, | |
| | | | | | U91326, AL035072, | |
| | | | | | AD000091, U82668, | |
| | | | | | AC012384, L44140, | |
| | | | | | AF006752, AL034350, | |
| | | | | | AC006039, AC005756, | |
| | | | | | AC005072, AL034429, | |
| | | | | | AC002352, AC005682, | |
| | | | | | AC003663, AC005049, | |
| | | | | | AC007298, AC005620, | |
| | | | | | AC004887, AL117694, | |
| | | | | | AC005911, AC007688, | |
| | | | | | AC006014, AC004797, | |
| | | | | | AL031186, AL031283, | |
| | | | | | AC004963, L47234, | |
| | | | | | Z84466, AC004125, | |
| | | | | | AC005529, AL031293, | |
| | | | | | AC006276, AL034400, | |
| | | | | | AC004099, AC005089, | |
| | | | | | AL049871, AC004893, | |
| | | | | | AL080243, AC007021, | |
| | | | | | AL049712, AC007993, | |
| | | | | | AC006581, AC005837, | |
| | | | | | AF139813, M13792, | |
| | | | | | AC005086, AL096791, | |
| | | | | | AJ251973, AC002301, | |
| | | | | | AC006139, AC005488, | |
| | | | | | L78810, AC006115, | |
| | | | | | AC004966, AC006538, | |
| | | | | | Z93244, AC004834, | |
| | | | | | AL049570, AC004084, | |
| | | | | | AP000113, AP000251, and | |
| | | | | | AC005696. | |
| HLTGA03 | 180 | 974851 | 1-890 | 15-904 | AI719655, AW082191, | |
| | | | | | AA761093, AA576454, | |
| | | | | | AI804392, AA505065, | |
| | | | | | AA641512, AI220630, and | |
| | | | | | AI189378. | |
| HFXJI27 | 181 | 971046 | 1-427 | 15-441 | AI335925, AI890750, | |
| | | | | | AA187638, N39062, | |
| | | | | | AI268071, D79411, N75622, | |
| | | | | | N22381, H13284, R43578, | |
| | | | | | F10497, R26373, AI625385, | |
| | | | | | AI220697, R21997, | |
| | | | | | AA932204, AI493179, | |
| | | | | | AI373111, AA909963, | |
| | | | | | AI476063, AA909961, | |
| | | | | | AI888010, AI619918, | |
| | | | | | AA976881, AW339040, | |
| | | | | | AI432041, AA015789, | |
| | | | | | AI049514, AI355877, | |
| | | | | | AI888471, N59174, | |
| | | | | | AI679618, AI373318, | |
| | | | | | AA670204, AI358468, | |
| | | | | | AI336216, AI266210, | |
| | | | | | AA947133, R33792, | |
| | | | | | AW081307, AA610540, | |
| | | | | | AA928678, AA922947, | |
| | | | | | AA922946, AI817788, | |
| | | | | | AI245931, AA948492, | |
| | | | | | AA044223, T63607, | |
| | | | | | AI433872, AW269052, | |
| | | | | | AI587384, AA827770, | |
| | | | | | AW182646, AI127888, | |
| | | | | | H89128, AI268557, D62713, | |
| | | | | | T63317, R35227, | |
| | | | | | AA018661, AW023089, | |
| | | | | | N67948, T62565, H01498, | |
| | | | | | R21841, AW151373, | |
| | | | | | D29213, AW022288, | |
| | | | | | AA678512, and AB023187. | |

[0085] TABLE 4

| Code | Description | Tissue | Organ | Cell Line | Disease | Vector |
|---|---|---|---|---|---|---|
| AR022 | a_Heart | a_Heart | | | | |
| AR023 | a_Liver | a_Liver | | | | |
| AR024 | a_mammary gland | a mammary gland | | | | |
| AR025 | a_Prostate | a_Prostate | | | | |
| AR026 | a_small intestine | a_small intestine | | | | |
| AR027 | a_Stomach | a_Stomach | | | | |
| AR028 | Blood B cells | Blood B cells | | | | |
| AR029 | Blood B cells activated | Blood B cells | | | | |
| | | activated | | | | |
| AR030 | Blood B cells resting | Blood B cells | | | | |
| | | resting | | | | |
| AR031 | Blood T cells activated | Blood T cells | | | | |
| | | activated | | | | |
| AR032 | Blood T cells resting | Blood T cells resting | | | | |
| AR033 | brain | brain | | | | |
| AR034 | breast | breast | | | | |
| AR035 | breast cancer | breast cancer | | | | |
| AR036 | Cell Line CAOV3 | Cell Line CAOV3 | | | | |
| AR037 | cell line PA-1 | cell line PA-1 | | | | |
| AR038 | cell line transformed | cell line transformed | | | | |
| AR039 | colon | colon | | | | |
| AR040 | colon (9808co65R) | colon (9808co65R) | | | | |
| AR041 | colon (9809co15) | colon (9809co 15) | | | | |
| AR042 | colon cancer | colon cancer | | | | |
| AR043 | colon cancer (9808co64R) | colon cancer | | | | |
| | | (9808co64R) | | | | |
| AR044 | colon cancer 9809co14 | colon cancer | | | | |
| | | 9809co14 | | | | |
| AR045 | corn clone 5 | corn clone 5 | | | | |
| AR046 | corn clone 6 | corn clone 6 | | | | |
| AR047 | corn clone2 | corn clone2 | | | | |
| AR048 | corn clone3 | corn clone3 | | | | |
| AR049 | Corn Clone4 | Corn Clone4 | | | | |
| AR050 | Donor II B Cells 24 hrs | Donor II B Cells | | | | |
| | | 24 hrs | | | | |
| AR051 | Donor II B Cells 72 hrs | Donor II B Cells | | | | |
| | | 72 hrs | | | | |
| AR052 | Donor II B-Cells 24 hrs. | Donor II B-Cells 24 | | | | |
| hrs. | | | | | | |
| AR053 | Donor II B-Cells 72 hrs | Donor II B-Cells | | | | |
| 72 hrs | | | | | | |
| AR054 | Donor II Resting B Cells | Donor II Resting B | | | | |
| | | Cells | | | | |
| AR055 | Heart | Heart | | | | |
| AR056 | Human Lung (clonetech) | Human Lung | | | | |
| | | (clonetech) | | | | |
| AR057 | Human Mammary | Human Mammary | | | | |
| | (clontech) | (clonrech) | | | | |
| AR058 | Human Thymus | Human Thymus | | | | |
| | (clonetech) | (clonetech) | | | | |
| AR059 | Jurkat (unstimulated) | Jurkat | | | | |
| | | (unstimulated) | | | | |
| AR060 | Kidney | Kidney | | | | |
| AR061 | Liver | Liver | | | | |
| AR062 | Liver (Clontech) | Liver (Clontech) | | | | |
| AR063 | Lymphocytes chronic | Lymphocytes | | | | |
| | lymphocytic leukaemia | chronic lymphocytic | | | | |
| | | leukaemia | | | | |
| AR064 | Lymphocytes diffuse large | Lymphocytes | | | | |
| | B cell lymphoma | diffuse large B cell | | | | |
| | | lymphoma | | | | |
| AR065 | Lymphocytes follicular | Lymphocytes | | | | |
| | lymphoma | follicular lymphoma | | | | |
| AR066 | normal breast | normal breast | | | | |
| AR067 | Normal Ovarian | Normal Ovarian | | | | |
| | (4004901) | (4004901) | | | | |
| AR068 | Normal Ovary 95080045 | Normal Ovary | | | | |
| | | 9508G045 | | | | |
| AR069 | Normal Ovary 9701G208 | Normal Ovary | | | | |
| | | 9701G208 | | | | |
| AR070 | Normal Ovary 9806G005 | Normal Ovary | | | | |
| | | 98060005 | | | | |
| AR071 | Ovarian Cancer | Ovarian Cancer | | | | |
| AR072 | Ovarian Cancer | Ovarian Cancer | | | | |
| | (9702G001) | (9702G001) | | | | |
| AR073 | Ovarian Cancer | Ovarian Cancer | | | | |
| | (9707G029) | (9707G029) | | | | |
| AR074 | Ovarian Cancer | Ovarian Cancer | | | | |
| | (9804G011) | (9804G011) | | | | |
| AR075 | Ovarian Cancer | Ovarian Cancer | | | | |
| | (9806G019) | (9806G019) | | | | |
| AR076 | Ovarian Cancer | Ovarian Cancer | | | | |
| | (9807G017) | (9807G017) | | | | |
| AR077 | Ovarian Cancer | Ovarian Cancer | | | | |
| | (9809G001) | (9809G001) | | | | |
| AR078 | ovarian cancer 15799 | ovarian cancer | | | | |
| | | 15799 | | | | |
| AR079 | Ovarian Cancer | Ovarian Cancer | | | | |
| | 17717AID | 17717AID | | | | |
| AR080 | Ovarian Cancer | Ovarian Cancer | | | | |
| | 4004664B1 | 4004664B1 | | | | |
| AR081 | Ovarian Cancer | Ovarian Cancer | | | | |
| | 4005315A1 | 4005315A1 | | | | |
| AR082 | ovarian cancer 94127303 | ovarian cancer | | | | |
| | | 94127303 | | | | |
| AR083 | Ovarian Cancer 96069304 | Ovarian Cancer | | | | |
| | | 96069304 | | | | |
| AR084 | Ovarian Cancer 9707G029 | Ovarian Cancer | | | | |
| | | 9707G029 | | | | |
| AR085 | Ovanan Cancer 9807G045 | Ovanan Cancer | | | | |
| | | 9807G045 | | | | |
| AR086 | ovarian cancer 9809G001 | ovanan cancer | | | | |
| | | 9809G001 | | | | |
| AR087 | Ovarian Cancer | Ovarian Cancer | | | | |
| | 9905C032RC | 9905C032RC | | | | |
| AR088 | Ovarian cancer 9907 C00 | Ovarian cancer 9907 | | | | |
| | 3rd | C00 3rd | | | | |
| AR089 | Prostate | Prostate | | | | |
| AR090 | Prostate (clonetech) | Prostate (clonetech) | | | | |
| AR091 | prostate cancer | prostate cancer | | | | |
| AR092 | prostate cancer #15176 | prostate cancer | | | | |
| | | #15176 | | | | |
| AR093 | prostate cancer #15509 | prostate cancer | | | | |
| | | #15509 | | | | |
| AR094 | prostate cancer #15673 | prostate cancer | | | | |
| | | #15673 | | | | |
| AR095 | Small Intestine (Clontech) | Small Intestine | | | | |
| | | (Clontech) | | | | |
| AR096 | Spleen | Spleen | | | | |
| AR097 | Thymus T cells activated | Thymus T cells | | | | |
| | | activated | | | | |
| AR098 | Thymus T cells resting | Thymus T cells | | | | |
| | | resting | | | | |
| AR099 | Tonsil | Tonsil | | | | |
| AR100 | Tonsil geminal center | Tonsil geminal | | | | |
| | centroblast | center centroblast | | | | |
| AR101 | Tonsil germinal center B | Tonsil germinal | | | | |
| | cell | center B cell | | | | |
| AR102 | Tonsil lymph node | Tonsil lymph node | | | | |
| AR103 | Tonsil memory B cell | Tonsil memory B | | | | |
| | | cell | | | | |
| AR104 | Whole Brain | Whole Brain | | | | |
| AR105 | Xenograft ES-2 | Xenograft ES-2 | | | | |
| AR106 | Xenograft SW626 | Xenograft SW626 | | | | |
| H0002 | Human Adult Heart | Human Adult Heart | Heart | | | Uni-ZAP |
| | | | | | | XR |
| H0004 | Human Adult Spleen | Human Adult | Spleen | | | Uni-ZAP |
| | | Spleen | | | | XR |
| H0008 | Whole 6 Week Old | | | | | Uni-ZAP |
| | Embryo | | | | | XR |
| H0009 | Human Fetal Brain | | | | | Uni-ZAP |
| | | | | | | XR |
| H0011 | Human Fetal Kidney | Human Fetal Kidney | Kidney | | | Uni-ZAP |
| | | | | | | XR |
| H0012 | Human Fetal Kidney | Human Fetal Kidney | Kidney | | | Uni-ZAP |
| | | | | | | XR |
| H0013 | Human 8 Week Whole | Human 8 Week Old | Embryo | | | Uni-ZAP |
| | Embryo | Embryo | | | | XR |
| H0014 | Human Gall Bladder | Human Gall Bladder | Gall Bladder | | | Uni-ZAP |
| | | | | | | XR |
| H0015 | Human Gall Bladder, | Human Gall Bladder | Gall Bladder | | | Uni-ZAP |
| | fraction II | | | | | XR |
| H0017 | Human Greater Omentum | Human Greater | pentoneum | | | Uni-ZAP |
| | | Omentum | | | | XR |
| H0018 | Human Greater Omentum, | Human Greater | pentoneum | | | Uni-ZAP |
| | fII remake | Omentum | | | | XR |
| H0020 | Human Hippocampus | Human | Brain | | | Uni-ZAP |
| | | Hippocampus | | | | XR |
| H0024 | Human Fetal Lung III | Human Fetal Lung | Lung | | | Uni-ZAP |
| | | | | | | XR |
| H0030 | Human Placenta | | | | | Uni-ZAP |
| | | | | | | XR |
| H0031 | Human Placenta | Human Placenta | Placenta | | | Uni-ZAP |
| | | | | | | XR |
| H0032 | Human Prostate | Human Prostate | Prostate | | | Uni-ZAP |
| | | | | | | XR |
| H0033 | Human Pituitary | Human Pituitary | | | | Uni-ZAP |
| | | | | | | XR |
| H0036 | Human Adult Small | Human Adult Small | Small Int. | | | Uni-ZAP |
| | Intestine | Intestine | | | | XR |
| H0037 | Human Adult Small | Human Adult Small | Small Int. | | | pBluescript |
| | Intestine | Intestine | | | | |
| H0038 | Human Testes | Human Testes | Testis | | | Uni-ZAP |
| | | | | | | XR |
| H0039 | Human Pancreas Tumor | Human Pancreas | Pancreas | | disease | Uni-ZAP |
| | | Tumor | | | | XR |
| H0040 | Human Testes Tumor | Human Testes | Testis | | disease | Uni-ZAP |
| | | Tumor | | | | XR |
| H0041 | Human Fetal Bone | Human Fetal Bone | Bone | | | Uni-ZAP |
| | | | | | | XR |
| H0042 | Human Adult Pulmonary | Human Adult | Lung | | | Uni-ZAP |
| | | Pulmonary | | | | XR |
| H0046 | Human Endometrial | Human Endometrial | Uterus | | disease | Uni-ZAP |
| | Tumor | Tumor | | | | XR |
| H0050 | Human Fetal Heart | Human Fetal Heart | Heart | | | Uni-ZAP |
| | | | | | | XR |
| H0051 | Human Hippocampus | Human | Brain | | | Uni-ZAP |
| | | Hippocampus | | | | XR |
| H0052 | Human Cerebellum | Human Cerebellum | Brain | | | Uni-ZAP |
| | | | | | | XR |
| H0056 | Human Umbilical Vein, | Human Umbilical | Umbilical | | | Uni-ZAP |
| | Endo. remake | Vein Endothelial | vein | | | XR |
| | | Cells | | | | |
| H0057 | Human Fetal Spleen | | | | | Uni-ZAP |
| | | | | | | XR |
| H0059 | Human Uterine Cancer | Human Uterine | Uterus | | disease | Lambda |
| | | Cancer | | | | ZAP II |
| H0060 | Human Macrophage | Human Macrophage | Blood | Cell Line | | pBluescript |
| H0063 | Human Thymus | Human Thymus | Thymus | | | Uni-ZAP |
| | | | | | | XR |
| H0068 | Human Skin Tumor | Human Skin Tumor | Skin | | disease | Uni-ZAP |
| | | | | | | XR |
| H0069 | Human Activated T-Cells | Activated T-Cells | Blood | Cell Line | | Uni-ZAP |
| | | | | | | XR |
| H0081 | Human Fetal Epithelium | Human Fetal Skin | Skin | | | Un-ZAP |
| | (Skin) | | | | | XR |
| H0083 | HUMAN JURKAT | Jurkat Cells | | | | Un-ZAP |
| | MEMBRANE BOUND | | | | | XR |
| | POLYSOMES | | | | | |
| H0085 | Human Colon | Human Colon | | | | Lambda |
| | | | | | | ZAP II |
| H0087 | Human Thymus | Human Thymus | | | | pBluescript |
| H0090 | Human T-CeIl Lymphoma | T-Cell Lymphoma | T-Cell | | disease | Uni-ZAP |
| | | | | | | XR |
| H0098 | Human Adult Liver, | Human Adult Liver | Liver | | | Uni-ZAP |
| | subtracted | XR | | | | |
| H0099 | Human Lung Cancer, | Human Lung Cancer | Lung | | | pBluescript |
| | subtracted | | | | | |
| H0100 | Human Whole Six Week | Human Whole Six | Embryo | | | Uni-ZAP |
| | Old Embryo | Week Old Embryo | | | | XR |
| H0103 | Human Fetal Brain, | Human Fetal Brain | Brain | | | Uni-ZAP |
| | subtracted | | | | | XR |
| H0123 | Human Fetal Dura Mater | Human Fetal Dura | Brain | | | Uni-ZAP |
| | | Mater | | | | XR |
| H0124 | Human | Human | Sk Muscle | | disease | Uni-ZAP |
| | Rhabdomyosarcoma | Rhabdomyosarcoma | | | | XR |
| H0125 | Cem cells cyclohexamide | Cyclohexamide | Blood | Cell Line | | Uni-ZAP |
| | treated | Treated Cem, Jurkat, | | | | XR |
| | | Raji, and Supt | | | | |
| H0131 | LNCAP + o.3nM R1881 | LNCAP Cell Line | Prostate | Cell Line | | Uni-ZAP |
| | | | | | | XR |
| H0132 | LNCAP + 30nM R1881 | LNCAP Cell Line | Prostate | Cell Line | | Uni-ZAP |
| | | | | | | XR |
| H0134 | Raji Cells, cyclohexamide | Cyclohexamide | Blood | Cell Line | | Uni-ZAP |
| | treated | Treated Cem, Jurkat, | | | | XR |
| | | Raji, and Supt | | | | |
| H0135 | Human Synovial Sarcoma | Human Synovial | Synovium | | | Uni-ZAP |
| | | Sarcoma | | | | XR |
| H0136 | Supt Cells, cyclohexamide | Cyclohexamide | Blood | Cell Line | | Uni-ZAP |
| | treated | Treated Cem, Jurkat, | | | | XR |
| | | Raji, and Supt | | | | |
| H0141 | Activated T-Cells, 12 hrs. | Activated T-Cells | Blood | Cell Line | | Uni-ZAP |
| | | | | | | XR |
| H0144 | Nine Week Old Early | 9 Wk Old Early | Embryo | | | Uni-ZAP |
| | Stage Human | Stage Human | | | | XR |
| H0150 | Human Epididymus | Epididymis | Testis | | | Uni-ZAP |
| | | | | | | XR |
| H0156 | Human Adrenal Gland | Human Adrenal | Adrenal | | disease | Uni-ZAP |
| | Tumor | Gland Tumor | Gland | | | XR |
| H0163 | Human Synovium | Human Synovium | Synovium | | | Uni-ZAP |
| | | | | | | XR |
| H0164 | Human Trachea Tumor | Human Trachea | Trachea | | disease | Uni-ZAP |
| | | Tumor | XR | | | |
| H0166 | Human Prostate Cancer, | Human Prostate | Prostate | | disease | Uni-ZAP |
| | Stage B2 fraction | Cancer, stage B2 | | | | XR |
| H0167 | Activated T-Cells, 24 hrs. | Activated T-Cells | Blood | Cell Line | | Uni-ZAP |
| | | | | | | XR |
| H0169 | Human Prostate Cancer, | Human Prostate | Prostate | | disease | Uni-ZAP |
| | Stage C fraction | Cancer, stage C | | | | XR |
| H0170 | 12 Week Old Early Stage | Twelve Week Old | Embryo | | | Uni-ZAP |
| | Human | Early Stage Human | | | | XR |
| H0171 | 12 Week Old Early Stage | Twelve Week Old | Embryo | | | Uni-ZAP |
| | Human, II | Early Stage Human | | | | XR |
| H0172 | Human Fetal Brain, | Human Fetal Brain | Brain | | | Lambda |
| | random primed | | | | | ZAP II |
| H0176 | CAMA1Ee Cell Line | CAMA1Ee Cell | Breast | Cell Line | | Uni-ZAP |
| | | Line | | | | XR |
| H0178 | Human Fetal Brain | Human Fetal Brain | Brain | | | Uni-ZAP |
| | | | | | | XR |
| H0179 | Human Neutrophil | Human Neutrophil | Blood | Cell Line | | Uni-ZAP |
| | | | | | | XR |
| H0181 | Human Primary Breast | Human Primary | Breast | | disease | Uni-ZAP |
| | Cancer | Breast Cancer | | | | XR |
| H0187 | Resting T-Cell | T-Cells | Blood | Cell Line | | Lambda |
| | | | | | | ZAP II |
| H0188 | Human Normal Breast | Human Normal | Breast | | | Uni-ZAP |
| | | Breast | | | | XR |
| H0191 | Human Activated | Human | Blood | Cell Line | | Uni-ZAP |
| | Macrophage (LPS), thiour | Macrophage/Monoc | | | | XR |
| | | ytes | | | | |
| H0194 | Human Cerebellum, | Human Cerebellum | Brain | | | pBluescript |
| | subtracted | | | | | |
| H0196 | Human Cardiomyopathy, | Human | Heart | | | Uni-ZAP |
| | subtracted | Cardiomyopathy | | | | XR |
| H0200 | Human Greater Omentum, | Human Greater | peritoneum | | | Uni-ZAP |
| | fract II remake. | Omentum | | | | XR |
| H0201 | Human Hippocampus, | Human | Brain | | | pBluescript |
| | subtracted | Hippocampus | | | | |
| H0207 | LNCAP, differential | LNCAP Cell Line | Prostate | Cell Line | | pBluescript |
| | expression | | | | | |
| H0208 | Early Stage Human Lung, | Human Fetal Lung | Lung | | | pBluescnpt |
| | subtracted | | | | | |
| H0213 | Human Pituitary, | Human Pituitary | | | | Uni-ZAP |
| | subtracted | | | | | XR |
| H0214 | Raji cells, cyclohexamide | Cyclohexamide | Blood | Cell Line | | pBluescript |
| | treated, subtracted | Treated Cem, Jurkat, | | | | |
| | Raji, and Supt | | | | | |
| H0222 | Activated T-Cells, 8 hrs, | Activated T-Cells | Blood | Cell Line | | Uni-ZAP |
| | subtracted | | | | | XR |
| H0233 | Human Fetal Heart, | Human Fetal Heart | Heart | | | pBluescript |
| | Differential (Adult- | | | | | |
| | Specific) | | | | | |
| H0244 | Human 8 Week Whole | Human 8 Week Old | Embryo | | | Uni-ZAP |
| | Embryo, subtracted | Embryo | | | | XR |
| H0250 | Human Activated | Human Monocytes | | | | Uni-ZAP |
| | Monocytes | | | | | XR |
| H0251 | Human Chondrosarcoma | Human | Cartilage | | disease | Uni-ZAP |
| | | Chondrosarcoma | | | | XR |
| H0252 | Human Osteosarcoma | Human | Bone | | disease | Uni-ZAP |
| | | Osteosarcoma | | | | XR |
| H0253 | Human adult testis, large | Human Adult Testis | Testis | | | Uni-ZAP |
| | inserts | | | | | XR |
| H0254 | Breast Lymph node cDNA | Breast Lymph Node | Lymph Node | | | Uni-ZAP |
| | library | | | | | XR |
| H0255 | breast lymph node CDNA | Breast Lymph Node | Lymph Node | | | Lambda |
| | library | | | | | ZAP II |
| H0257 | HL-60, PMA 4H | HL-60 Cells, PMA | Blood | Cell Line | | Uni-ZAP |
| | | stimulated 4H | | | | XR |
| H0261 | H. cerebellum, Enzyme | Human Cerebellum | Brain | | | Uni-ZAP |
| | subtracted | | | | | XR |
| H0263 | human colon cancer | Human Colon | Colon | | disease | Lambda |
| | | Cancer | | | | ZAP II |
| H0264 | human tonsils | Human Tonsil | Tonsil | | | Uni-ZAP |
| | | | | | | XR |
| H0265 | Activated T-Cell | T-Cells | Blood | Cell Line | | Uni-ZAP |
| | (12 hs)/Thiouridine | | | | | XR |
| | labelledEco | | | | | |
| H0266 | Human Microvascular | HMEC | Vein | Cell Line | | Lambda |
| | Endothelial Cells, fract. A | | | | | ZAP II |
| H0268 | Human Umbilical Vein | HUVE Cells | Umbilical | Cell Line | | Lambda |
| | Endothelial Cells, fract. A | | vein | ZAP H | | |
| H0269 | Human Umbilical Vein | HUVE Cells | Umbilical | Cell Line | | Lambda |
| | Endothelial Cells. fract. B | | vein | | | ZAP II |
| H0271 | Human Neutrophil, | Human Neutrophil - | Blood | Cell Line | | Uni-ZAP |
| | Activated | Activated | | | | XR |
| H0272 | HUMAN TONSILS, | Human Tonsil | Tonsil | | | Uni-ZAP |
| | FRACTION 2 | | | | | XR |
| H0282 | HBGB″s differential | Human Primary | Breast | | | Uni-ZAP |
| | consolidation | Breast Cancer | | | | XR |
| H0284 | Human OB MG63 control | Human | Bone | Cell Line | | Uni-ZAP |
| | fraction I | Osteoblastoma | | | | XR |
| | | MG63 cell line | | | | |
| H0286 | Human OB MG63 treated | Human | Bone | Cell Line | | Uni-ZAP |
| | (10 nM E2) fraction I | Osteoblastoma | | | | XR |
| | | MG63 cell line | | | | |
| H0292 | Human OB HOS treated | Human | Bone | Cell Line | | Uni-ZAP |
| | (10 nM E2) fraction I | Osteoblastoma HOS | | | | XR |
| | | cell line | | | | |
| H0294 | Amniotic Cells - TNF | Amniotic Cells - | Placenta | Cell Line | | Uni-ZAP |
| | induced | TNF induced | | | | XR |
| H0295 | Amniotic Cells - Primary | Amniotic Cells - | Placenta | Cell Line | | Uni-ZAP |
| | Culture | Primary Culture | | | | XR |
| H0305 | CD34 positive cells (Cord | CD34 Positive Cells | Cord Blood | | | ZAP |
| | Blood) | | | | | Express |
| H0306 | CD34 depleted Buffy Coat | CD34 Depleted | Cord Blood | | | ZAP |
| | (Cord Blood) | Buffy Coat (Cord | | | | Express |
| | | Blood) | | | | |
| H0309 | Human Chronic Synovitis | Synovium, Chronic | Synovium | | disease | Uni-ZAP |
| | | Synovitis/ | | | | XR |
| | | Osteoarthritis | | | | |
| H0316 | HUMAN STOMACH | Human Stomach | Stomach | | | Uni-ZAP |
| | | | | | | XR |
| H0318 | HUMAN B CELL | Human B Cell | Lymph Node | | disease | Uni-ZAP |
| | LYMPHOMA | Lymphoma | | | | XR |
| H0327 | human corpus colosum | Human Corpus | Brain | | | Uni-ZAP |
| | | Callosum | | | | XR |
| H0328 | human ovarian cancer | Ovarian Cancer | Ovary | | disease | Uni-ZAP |
| | | | | | | XR |
| H0329 | Dermatofibrosarcoma | Dermatofibrosarcom | Skin | | disease | Uni-ZAP |
| | Protuberance | a Protuberans | | | | XR |
| H0331 | Hepatocellular Tumor | Hepatocellular | Liver | | disease | Lambda |
| | | Tumor | | | | ZAP II |
| H0333 | Hemangiopericytoma | Hemangiopericytom | Blood vessel | | disease | Lambda |
| | | a | | | | ZAP II |
| H0334 | Kidney cancer | Kidney Cancer | Kidney | | disease | Uni-ZAP |
| | | | | | | XR |
| H0341 | Bone Marrow Cell Line | Bone Marrow Cell | Bone Marrow | Cell Line | | Uni-ZAP |
| | (RS4;11) | Line RS4;11 | | | | XR |
| H0342 | Lingual Gyrus | Lingual Gyrus | Brain | | | Uni-Zap |
| | | | | | | XR |
| H0344 | Adipose tissue (human) | Adipose - 6825A | | | | Uni-ZAP |
| | | (human) | | | | XR |
| H0345 | SKIN | Skin - 4000868H | Skin | | | Uni-ZAP |
| | | | | | | XR |
| H0346 | Brain-medulloblastoma | Brain | Brain | | disease | Uni-ZAP |
| | | (Medulloblastoma)- | | | | XR |
| | | 9405C006R | | | | |
| H0351 | Glioblastoma | Glioblastoma | Brain | | disease | Uni-ZAP |
| | | | | | | XR |
| H0352 | wilm″s tumor | Wilm″s Tumor | | | disease | Uni-ZAP |
| | | | | | | XR |
| H0354 | Human Leukocytes | Human Leukocytes | Blood | Cell Line | | pCMVSport |
| | | | | | | 1 |
| H0355 | Human Liver | Human Liver, | | | | pCMVSport |
| | | normal Adult | | | | 1 |
| H0356 | Human Kidney | Human Kidney | Kidney | | | pCMVSport |
| | | | | | | 1 |
| H0357 | H. Normalized Fetal | Human Fetal Liver | Liver | | | Uni-ZAP |
| | Liver, II | | | | | XR |
| H0361 | Human rejected kidney | Human Rejected | | | disease | pBluescript |
| | | Kidney | | | | |
| H0369 | H. Atrophic Endometnum | Atrophic | | | | Uni-ZAP |
| | | Endometrium and | | | | XR |
| | | myometnum | | | | |
| H0370 | H. Lymph node breast | Lymph node with | | | disease | Uni-ZAP |
| | Cancer | Met. Breast Cancer | | | | XR |
| H0372 | Human Testes | Human Testes | Testis | | | pCMVSport |
| | | | | | | 1 |
| H0373 | Human Heart | Human Adult Heart | Heart | | | pCMVSport |
| | | | | | | 1 |
| H0375 | Human Lung | Human Lung | | | | pCMVSport |
| | | | | | | 1 |
| H0379 | Human Tongue, frac 1 | Human Tongue | | | | pSport1 |
| H0383 | Human Prostate BPH, re- | Human Prostate | | | | Uni-ZAP |
| | excision | BPH | | | | XR |
| H0390 | Human Amygdala | Human Amygdala | | | disease | pBluescript |
| | Depression, re-excision | Depression | | | | |
| H0391 | H. Meningima, M6 | Human Meningima | brain | | | pSport1 |
| H0392 | H. Meningima, M1 | Human Meningima | brain | | | pSport1 |
| H0393 | Fetal Liver, subtraction II | Human Fetal Liver | Liver | | | pBluescnpt |
| H0394 | A-14 cell line | Redd-Sternberg cell | | | | ZAP |
| | | | | | | Express |
| H0395 | Al-CELL LINE | Redd-Sternberg cell | | | | ZAP |
| | | | | | | Express |
| H0398 | Human Newborn Bladder | Human Newbom | | | | pBluescript |
| | | Bladder | | | | |
| H0399 | Human Kidney Cortex, re- | Human Kidney | | | | Lambda |
| | rescue | Cortex | | | | ZAP II |
| H0400 | Human Striatum | Human Brain, | Brain | | | Lambda |
| | Depression, re-rescue | Striatum Depression | | | | ZAP II |
| H0402 | CD34 depleted Buffy Coat | CD34 Depleted | Cord Blood | | | ZAP |
| | (Cord Blood), re-excision | Buffy Coat (Cord | | | | Express |
| | | Blood) | | | | |
| H0404 | H. Umbilical Vein | HUVE Cells | Umbilical | Cell Line | | Uni-ZAP |
| | endothelial cells, | | vein | | | XR |
| | uninduced | | | | | |
| H0408 | Human kidney Cortex, | Human Kidney | | | | pBluescript |
| | subtracted | Cortex | | | | |
| H0409 | H. Striatum Depression, | Human Brain, | Brain | | | pBluescript |
| | subtractedStriatum Depression | | | | | |
| H0411 | H Female Bladder, Adult | Human Female | Bladder | | | pSport1 |
| | | Adult Bladder | | | | |
| H0412 | Human umbilical vein | HUVE Cells | Umbilical | Cell Line | | pSport1 |
| | endothelial cells, IL-4 | | vein | | | |
| | induced | | | | | |
| H0413 | Human Umbilical Vein | HUVE Cells | Umbilical | Cell Line | | pSport1 |
| | Endothelial Cells, | | vein | | | |
| | uninduced | | | | | |
| H0414 | Ovarian Tumor I, OV5232 | Ovarian Tumor, | Ovary | | disease | pSport1 |
| | | OV5232 | | | | |
| H0415 | H. Ovarian Tumor, II, | Ovarian Tumor, | Ovary | | disease | pCMVSport |
| | OV5232 | OV5232 | | | | 2.0 |
| H0416 | Human Neutrophils, | Human Neutrophil - | Blood | Cell Line | | pBluescript |
| | Activated, re-excision | Activated | | | | |
| H0421 | Human Bone Marrow, re- | Bone Marrow | | | | pBluescript |
| | excision | | | | | |
| H0422 | T-Cell PHA 16 hrs | T-Cells | Blood | Cell Line | | pSport1 |
| H0423 | T-Cell PHA 24 hrs | T-Cells | Blood | Cell Line | | pSport1 |
| H0427 | Human Adipose | Human Adipose, left | | | | pSport1 |
| | | hiplipoma | | | | |
| H0428 | Human Ovary | Human Ovary | Ovary | | | pSport1 |
| | | Tumor | | | | |
| H0429 | K562 +PMA (36 hrs),re- | K562 Cell line | cell line | Cell Line | | ZAP |
| | excision | | | | | Express |
| H0431 | H. Kidney Medulla, re- | Kidney medulla | Kidney | | | pBluescript |
| | excision | | | | | |
| H0432 | H. Kidney Pyramid | Kidney pyramids | Kidney | | | pBluescript |
| H0435 | Ovarian Tumor 10-3-95 | Ovarian Tumor, | Ovary | | | pCMVSport |
| | | OV350721 | | | | 2.0 |
| H0436 | Resting T-Cell Library,Il | T-Cells | Blood | Cell Line | | Sport1 |
| H0437 | H Umbilical Vein | HUVE Cells | Umbilical | Cell Line | | Lambda |
| | Endothelial Cells, frac A, | | vein | | | ZAP II |
| | re-excision | | | | | |
| H0438 | H. Whole Brain #2, re- | Human Whole Brain | | | | ZAP |
| | excision | #2 | | | | Express |
| H0441 | H. Kidney Cortex, | Kidney cortex | Kidney | | | pBluescript |
| | subtracted | | | | | |
| H0442 | H. Striatum Depression, | Human Brain, | Brain | | | pBluescript |
| | subt II | Striarum Depression | | | | |
| H0443 | H. Adipose, subtracted | Human Adipose, left | | | | pSport1 |
| | | hiplipoma | | | | |
| H0444 | Spleen metastic melanoma | Spleen, Metastic | Spleen | | disease | pSport1 |
| | | malignant | | | | |
| | | melanoma | | | | |
| H0445 | Spleen, Chronic | Human Spleen, CLL | Spleen | | disease | pSport1 |
| | lymphocytic leukemia | | | | | |
| H0449 | CD34 + cell, I | CD34 positive cells | | | | pSport1 |
| H0453 | H. Kidney Pyramid, | Kidney pyramids | Kidney | | | pBluescript |
| | subtracted | | | | | |
| H0457 | Human Eosinophils | Human Eosinophils | | | | pSport1 |
| H0459 | CD34 + cells, II, | CD34 positive cells | | | | pCMVSport |
| | FRACTION 2 | | | | | 2.0 |
| H0478 | Salivary Gland, Lib 2 | Human Salivary | Salivary | | | pSport1 |
| | | Gland | gland | | | |
| H0483 | Breast Cancer cell line, | Breast Cancer Cell | | | | pSport1 |
| | MDA 36 | line, MDA 36 | | | | |
| H0484 | Breast Cancer Cell line, | Breast Cancer Cell | | | | pSport1 |
| | angiogenic | line, Angiogenic, | | | | |
| | | 36T3 | | | | |
| H0485 | Hodgkin″s Lymphoma I | Hodgkin″s | | | disease | pCMVSport |
| | | Lymphoma I | | | | 2.0 |
| H0486 | Hodgkin″s Lymphoma II | Hodgkin″s | | | disease | pCMVSporr |
| | | Lymphoma II | | | | 2.0 |
| H0487 | Human Tonsils, lib 1 | Human Tonsils | | | | pCMVSport |
| | | | | | | 2.0 |
| H0488 | Human Tonsils, Lib 2 | Human Tonsils | | | | pCMVSport |
| | | | | | | 2.0 |
| H0494 | Keratinocyte | Keratinocyte | | | | pCMVSport |
| | | | | | | 2.0 |
| H0497 | HEL cell line | HEL cell line | | HEL | | pSport1 |
| | | | | 92.1.7 | | |
| H0506 | Ulcerative Colitis | Colon | Colon | | | pSport1 |
| H0509 | Liver, Hepatoma | Human Liver, | Liver | | disease | pCMVSport |
| | | Hepatoma, patient 8 | | | | 3.0 |
| H0510 | Human Liver, normal | Human Liver, | Liver | | | pCMVSport |
| | | normal, Patient #8 | | | | 3.0 |
| H0517 | Nasal polyps | Nasal polyps | | | | pCMVSport |
| | | | | | | 2.0 |
| H0518 | pBMC stimulated w/ poly | pBMC stimulated | | | | pCMVSport |
| | I/C | with poly I/C | | | | 3.0 |
| H0519 | NTERA2, control | NTERA2, | | | | pCMVSport |
| | | Teratocarcinoma | | | | 3.0 |
| | | cell line | | | | |
| H0520 | NTERA2 + retinoic acid, | NTERA2, | | | | pSport1 |
| | 14 days | Teratocarcinoma | | | | |
| | | cell line | | | | |
| H0521 | Primary Dendritic Cells, | Primary Dendritic | | | | pCMVSport |
| | lib 1 | cells | | | | 3.0 |
| H0522 | Primary Dendritic | Primary Dendritic | | | | pCMVSport |
| | cells,frac 2 | cells | | | | 3.0 |
| H0529 | Myoloid Progenitor Cell | TF-1 Cell Line; | | | | pCMVSport |
| | Line | Myoloid progenitor | | | | 3.0 |
| | | cell line | | | | |
| H0538 | Merkel Cells | Merkel cells | Lymph node | | | pSport1 |
| H0539 | Pancreas Islet Cell Tumor | Pancreas Islet Cell | Pancreas | | disease | pSport1 |
| | | Tumour | | | | |
| H0540 | Skin, burned | Skin, leg burned | Skin | | | pSport1 |
| H0542 | T Cell helper I | Helper T cell | | | | pCMVSport |
| | | | | | | 3.0 |
| H0543 | T cell helper II | Helper T cell | | | | pCMVSport |
| | | | | | | 3.0 |
| H0544 | Human endometrial | Human endometrial | | | | pCMVSport |
| | stromal cells | stromal cells | | | | 3.0 |
| H0545 | Human endometnal | Human endometrial | | | | pCMVSport |
| | stromal cells-treated with | stromal cells-treated | | | | 3.0 |
| | progesterone | with proge | | | | |
| H0546 | Human endometrial | Human endometrial | | | | pCMVSport |
| | stromal cells-treated with | stromal cells-treated | | | | 3.0 |
| | estradiol | with estra | | | | |
| H0547 | NTERA2 teratocarcinoma | NTERA2, | | | | pSport1 |
| | cell line + retinoic acid (14 | Teratocarcinoma | | | | |
| | days) | cell line | | | | |
| H0549 | H. Epididiymus, caput & | Human | | | | Uni-ZAP |
| | corpus | Epididiymus, caput | | | | XR |
| | | and corpus | | | | |
| H0550 | H. Epididiymus, cauda | Human | | | | Uni-ZAP |
| | | Epididiymus, cauda | | | | XR |
| H0551 | Human Thymus Stromal | Human Thymus | | | | pCMVSport |
| | Cells | Stromal Cells | | | | 3.0 |
| H0553 | Human Placenta | Human Placenta | | | | pCMVSport |
| | | | | | | 3.0 |
| H0555 | Rejected Kidney, lib 4 | Human Rejected | Kidney | | disease | pCMVSport |
| | | Kidney | | | | 3.0 |
| H0556 | Activated T- | T-Cells | Blood | Cell Line | | Uni-ZAP |
| | cell(12 h)/Thiouridine-re- | | | | | XR |
| | excision | | | | | |
| H0559 | HL-60, PMA 4H, re- | HL-60 Cells, PMA | Blood | Cell Line | | Uni-ZAP |
| | excision | stimulated 4H | | | | XR |
| H0560 | KMH2 | KMH2 | | | | pCMVSport |
| | | | | | | 3.0 |
| H0561 | L428 | L428 | | | | pCMVSport |
| | | | | | | 3.0 |
| H0570 | Human Fetal Brain, | Human Fetal Brain | | | | pCMVSport |
| | normalized C500H | | | | | 2.0 |
| H0571 | Human Fetal Brain, | Human Fetal Brain | | | | pCMVSport |
| | normalized C500HE | | | | | 2.0 |
| H0572 | Human Fetal Brain, | Human Fetal Brain | | | | pCMVSport |
| | normalized AC5002 | | | | | 2.0 |
| H0574 | Hepatocellular Tumor; re- | Hepatocellular | Liver | | disease | Lambda |
| | excision | Tumor | | | | ZAP II |
| H0575 | Human Adult | Human Adult | Lung | | | Uni-ZAP |
| | Pulmonary;re-excision | Pulmonary | | | | XR |
| H0576 | Resting T-Cell; re- | T-Cells | Blood | Cell Line | | Lambda |
| | excision | | | | | ZAP II |
| H0580 | Dendritic cells, pooled | Pooled dendritic | | | | pCMVSport |
| | | cells | | | | 3.0 |
| H0581 | Human Bone Marrow, | Human Bone | Bone Marrow | | | pCMVSport |
| | treated | Marrow | | | | 3.0 |
| H0583 | B Cell lymphoma | B Cell Lymphoma | B Cell | | disease | pCMVSport |
| | | | | | | 3.0 |
| H0584 | Activated T-cells, 24 | Activated T-Cells | Blood | Cell Line | | Uni-ZAP |
| | hrs,re-excision | | | | | XR |
| H0585 | Activated T-Cells,12 | Activated T-Cells | Blood | Cell Line | | Uni-ZAP |
| | hrs,re-excision | | | | | XR |
| H0586 | Healing groin wound, 6.5 | healing groin | groin | | disease | pCMVSport |
| | hours post incision | wound, 6.5 hours | | | | 3.0 |
| | | post incision - 2/ | | | | |
| H0587 | Healing groin wound; 7.5 | Groin-2/19/97 | groin | | disease | pCMVSport |
| | hours post incision | | | | | 3.0 |
| H0589 | CD34 positive cells (cord | CD34 Positive Cells | Cord Blood | | | ZAP |
| | blood),re-ex | | | | | Express |
| H0590 | Human adult small | Human Adult Small | Small Int. | | | Uni-ZAP |
| | intestine,re-excision | Intestine | | | | XR |
| H0591 | Human T-cell | T-Cell Lymphoma | T-Cell | | disease | Uni-ZAP |
| | lymphoma:re-excision | | | | | XR |
| H0592 | Healing groin wound - | HGS wound healing | | | disease | pCMVSport |
| | zero hr post-incision | project; abdomen | | | | 3.0 |
| | (control) | | | | | |
| H0593 | Olfactory | Olfactory epithelium | | | | pCMVSport |
| | epithelium;nasalcavity | from roof of left | | | | 3.0 |
| | | nasal cacit | | | | |
| H0594 | Human Lung Cancer;re- | Human Lung Cancer | Lung | | disease | Lambda |
| | excision | | | | | ZAP II |
| H0595 | Stomach cancer | Stomach Cancer - | | | disease | Uni-ZAP |
| | (human);re-excision | 5383A (human) | | | | XR |
| H0596 | Human Colon Cancer;re- | Human Colon | Colon | | | Lambda |
| | excision | Cancer | | | | ZAP II |
| H0597 | Human Colon; re-excision | Human Colon | | | | Lambda |
| | | | | | | ZAP II |
| H0598 | Human Stomach;re- | Human Stomach | Stomach | | | Uni-ZAP |
| | excision | | | | | XR |
| H0599 | Human Adult Heart;re- | Human Adult Heart | Heart | | | Uni-ZAP |
| | excision | | | | | XR |
| H0600 | Healing Abdomen | Abdomen | | | disease | pCMVSport |
| | wound;70&90 min post | | | | | 3.0 |
| | incision | | | | | |
| H0604 | Human Pituitary, re- | Human Pituitary | | | | pBluescript |
| | excision | | | | | |
| H0606 | Human Primary Breast | Human Primary | Breast | | disease | Uni-ZAP |
| | Cancer;re-excision | Breast Cancer | | | | XR |
| H0608 | H. Leukocytes, control | H.Leukocytes | | | | pCMVSport |
| | | | | | | 1 |
| H0613 | H.Leukocytes, normalized | H.Leukocytes | | | | pCMVSport |
| | cot 5B | | | | | 1 |
| H0615 | Human Ovarian Cancer | Ovarian Cancer | Ovary | | disease | Uni-ZAP |
| | Reexcision | | | | | XR |
| H0616 | Human Testes, Reexcision | Human Testes | Testis | | | Uni-ZAP |
| | | | | | | XR |
| H0617 | Human Primary Breast | Human Primary | Breast | | disease | Uni-ZAP |
| | Cancer Reexcision | Breast Cancer | | | | XR |
| H0618 | Human Adult Testes, | Human Adult Testis | Testis | | | Uni-ZAP |
| | Large Inserts, Reexcision | | | | | XR |
| H0619 | Fetal Heart | Human Fetal Heart | Heart | | | Uni-ZAP |
| | | | | | | XR |
| H0620 | Human Fetal Kidney; | Human Fetal Kidney | Kidney | | | Uni-ZAP |
| | Reexcision | | | | | XR |
| H0622 | Human Pancreas Tumor; | Human Pancreas | Pancreas | | disease | Uni-ZAP |
| | Reexcision | Tumor | | | | XR |
| H0623 | Human Umbilical Vein; | Human Umbilical | Umbilical | | | Uni-ZAP |
| | Reexcision | Vein Endothelial | vein | | | XR |
| | | Cells | | | | |
| H0624 | 12 Week Early Stage | Twelve Week Old | Embryo | | | Uni-ZAP |
| | Human II; Reexcision | Early Stage Human | | | | XR |
| H0625 | Ku 812F Basophils Line | Ku 812F Basophils | | | | pSport1 |
| H0626 | Saos2 Cells; Untreated | Saos2 Cell Line; | | | | pSport1 |
| | | Untreated | | | | |
| H0627 | Saos2 Cells; Vitamin D3 | Saos2 Cell Line; | | | | pSport1 |
| | Treated | Vitamin D3 Treated | | | | |
| H0628 | Human Pre-Differentiated | Human Pre- | | | | Uni-ZAP |
| | Adipocytes | Differentiated | | | | XR |
| | | Adipocytes | | | | |
| H0630 | Human | Human Normalized | | | | pCMVSport |
| | Leukocytes,normalized | leukocyte | | | | 1 |
| | control #4 | | | | | |
| H0631 | Saos2, Dexamethosome | Saos2 Cell Line; | | | | pSport1 |
| | Treated | Dexamediosome | | | | |
| | | Treated | | | | |
| H0632 | Hepatocellular Tumor;re- | Hepatocellular | Liver | | | Lambda |
| | excision | Tumor | | | | ZAP II |
| H0633 | Lung Carcinoma A549 | TNFalpha activated | | | disease | pSport1 |
| | TNFalpha activated | A549--Lung | | | | |
| | | Carcinoma | | | | |
| H0634 | Human Testes Tumor, re- | Human Testes | Testis | | disease | Uni-ZAP |
| | excision | Tumor | | | | XR |
| H0635 | Human Activated T-Cells, | Activated T-Cells | Blood | Cell Line | | Uni-ZAP |
| | re-excision | | | | | XR |
| H0637 | Dendritic Cells From | Dentntic cells from | | | | pSport1 |
| | CD34 Cells | CD34 cells | | | | |
| H0638 | CD40 activated monocyte | CD40 activated | | | | pSport1 |
| | dendridic cells | monocyte dendridic | | | | |
| | | cells | | | | |
| H0641 | LPS activated derived | LPS activated | | | | pSport1 |
| | dendritic cells | monocyte derived | | | | |
| | | dendritic cells | | | | |
| H0642 | Hep G2 Cells, lambda | Hep 62 Cells | | | | Other |
| | library | | | | | |
| H0643 | Hep G2 Cells, PCR library | Hep G2 Cells | | | | Other |
| H0644 | Human Placenta (re- | Human Placenta | Placenta | | | Uni-ZAP |
| | excision) | | | | | XR |
| H0645 | Fetal Heart, re-excision | Human Fetal Heart | Heart | | | Uni-ZAP |
| | | | | | | XR |
| H0646 | Lung, Cancer (4005313 | Metastatic | | | | pSport1 |
| | A3): Invasive Poorly | squamous cell lung | | | | |
| | Differentiated Lung | carcinoma, poorly di | | | | |
| | Adenocarcinoma, | | | | | |
| H0647 | Lung, Cancer (4005163 | Invasive poorly | | | disease | pSport1 |
| | B7): Invasive, Poorly Diff. | differentiated lung | | | | |
| | Adenocarcinoma, | adenocarcinoma | | | | |
| | Metastatic | | | | | |
| H0648 | Ovary, Cancer: (4004562 | Papillary Cstic | | | disease | pSport1 |
| | B6) Papillary Serous | neoplasm of low | | | | |
| | Cystic Neoplasm, Low | malignant potentia | | | | |
| | Malicnant Pot | | | | | |
| H0649 | Lung, Normal: (4005313 | Normal Lung | | | | pSport1 |
| | B1) | | | | | |
| H0650 | B-Cells | B-Cells | | | | pCMVSport |
| | | | | | | 3.0 |
| H0651 | Ovary, Normal: | Normal Ovary | | | | pSport1 |
| | (9805C040R) | | | | | |
| H0654 | Lung, Cancer: (4005313 | Metastatic | | | | Other |
| | A3) Invasive Poorly- | Squamous cell lung | | | | |
| | differentiated Metastatic | Carcinoma poorly | | | | |
| | lung adenoc | dif | | | | |
| H0656 | B-cells (unstimulated) | B-cells | | | | pSport1 |
| | | (unstimulated) | | | | |
| H0657 | B-cells (stimulated) | B-cells (stimulated) | | | | pSport1 |
| H0658 | Ovary, Cancer | 9809C332- Poorly | Ovary & | | disease | pSport1 |
| | (9809C332): Poorly | differentiate | Fallopian | | | |
| | differentiated | | Tubes | | | |
| | adenocarcinoma | | | | | |
| H0659 | Ovary, Cancer | Grade II Papillary | Ovary | | disease | pSport1 |
| | (15395A1F): Grade II | Carcinoma, Ovary | | | | |
| | Papillary Carcinoma | | | | | |
| H0660 | Ovary, Cancer; | Poorly differentiated | | | disease | pSport1 |
| | (15799A1F) Poorly | carcinoma, ovary | | | | |
| | differentiated carcinoma | | | | | |
| H0661 | Breast, Cancer: (4004943 | Breast cancer | | | disease | pSport1 |
| | A5) | | | | | |
| H0662 | Breast, Normal: | Normal Breast - | Breast | | | pSport1 |
| | (4005522B2) | #4005522(B2) | | | | |
| H0663 | Breast, Cancer: (4005522 | Breast Cancer - | Breast | | disease | pSport1 |
| | A2) | #4005522(A2) | | | | |
| H0664 | Breast, Cancer: | Breast Cancer | Breast | | disease | pSport1 |
| | (9806C01 2R) | | | | | |
| H0665 | Stromal cells 3.88 | Stromal cells 3 88 | | | | pSport1 |
| H0666 | Ovary, Cancer: (4004332 | Ovarian Cancer, | | | disease | pSport1 |
| | A2) | Sample | | | | |
| | | #4004332A2 | | | | |
| H0667 | Stromal cells(HBM3.18) | Stromal cell(HBM | | | | pSport1 |
| | | 3.18) | | | | |
| H0668 | stromal cell clone 2.5 | stromal cell clone | | | | pSport1 |
| | | 2.5 | | | | |
| H0670 | Ovary, Cancer(4004650 | Ovarian Cancer - | | | | pSport1 |
| | A3): Well-Differentiated | 4004650A3 | | | | |
| | Micropapillary Serous | | | | | |
| | Carcinoma | | | | | |
| H0671 | Breast, Cancer: | Breast Cancer- | | | | pSport1 |
| | (9802C02OE) | Sample # | | | | |
| | | 9802C02OE | | | | |
| H0672 | Ovary, Cancer: (4004576 | Ovarian | Ovary | | | pSport1 |
| | A8) | Cancer(4004576A8) | | | | |
| H0673 | Human Prostate Cancer, | Human Prostate | Prostate | | | Uni-ZAP |
| | Stage B2; re-excision | Cancer, stage B2 | | | | XR |
| H0674 | Human Prostate Cancer, | Human Prostate | Prostate | | | Uni-ZAP |
| | Stage C; re-excission | Cancer, stage C | | | | XR |
| H0675 | Colon, Cancer: | Colon Cancer | | | | pCMVSport |
| | (9808C064R) | 9808C064R | | | | 3.0 |
| H0677 | TNFR degenerate oligo | B-Cells | | | | PCRII |
| H0682 | Serous Papillary | serous papillary | | | | pCMVSport |
| | Adenocarcinoma | adenocarcinoma | | | | 3.0 |
| | | (9606G304SPA3B) | | | | |
| H0683 | Ovarian Serous Papillary | Serous papillary | | | | pCMVSport |
| | Adenocarcinoma | adenocarcinoma, | | | | 3.0 |
| | | stage 3C (9804G01 | | | | |
| H0684 | Serous Papillary | Ovarian Cancer- | Ovaries | | | pCMVSport |
| | Adenocarcinoma | 9810G606 | | | | 3.0 |
| H0685 | Adenocarcinoma of | Adenocarcinoma of | | | | pCMVSport |
| | Ovary, Human Cell Line, | Ovary, Human Cell | | | | 3.0 |
| | #OVCAR-3 | Line, #OVCAR | | | | |
| H0686 | Adenocarcinoma of | Adenocarcinoma of | | | | pCMVSport |
| | Ovary, Human Cell Line | Ovary, Human Cell | | | | 3.0 |
| | | Line, #SW-626 | | | | |
| H0687 | Human normal | Human normal | Ovary | | | pCMVSport |
| | ovary(#9610G215) | ovary(#9610G215) | | | | 3.0 |
| H0689 | Ovarian Cancer | Ovarian Cancer, | | | | pCMVSport |
| | | #9806G019 | | | | 3.0 |
| H0690 | Ovarian Cancer, # | Ovarian Cancer, | | | | pCMVSport |
| | 9702G001 | #9702G001 | | | | 3.0 |
| H0691 | Normal Ovary, | normal ovary, | | | | pCMVSport |
| | #9710G208 | #9710G208 | | | | 3.0 |
| H0693 | Normal Prostate | Normal Prostate | | | | pCMVSport |
| | #ODQ3958EN | Tissue # | | | | 3.0 |
| | | ODQ3958EN | | | | |
| H0694 | Prostate gland | Prostate gland, | prostate | | | pCMVSport |
| | adenocarcinoma | adenocarcinoma, | gland | | | 3.0 |
| | | mod/diff, gleason | | | | |
| N0006 | Human Fetal Brain | Human Fetal Brain | | | | |
| S0001 | Brain frontal cortex | Brain frontal cortex | Brain | | | Lambda |
| | | | | | | ZAP II |
| S0002 | Monocyte activated | Monocyte-activated | blood | Cell Line | | Uni-ZAP |
| | | | | | | XR |
| S0003 | Human Osteoclastoma | Osteoclastoma | bone | | disease | Uni-ZAP |
| | | | | | | XR |
| S0004 | Prostate | Prostate BPH | Prostate | | | Lambda |
| | | | | | | ZAP II |
| S0007 | Early Stage Human Brain | Human Fetal Brain | | | | Uni-ZAP |
| | | | | | | XR |
| S0010 | Human Amygdala | Amygdala | | | | Uni-ZAP |
| | | | | | | XR |
| S0011 | STROMAL - | Osteoclastoma | bone | | disease | Uni-ZAP |
| | OSTEOCLASTOMA | | | | | XR |
| S0013 | Prostate | Prostate | prostate | | | Uni-ZAP |
| | | | | | | XR |
| S0016 | Kidney Pyramids | Kidney pyramids | Kidney | | | Uni-ZAP |
| | | | | | | XR |
| S0021 | Whole brain | Whole brain | Brain | | | ZAP |
| | | | | | | Express |
| S0022 | Human Osteoclastoma | Osteoclastoma | | | | Uni-ZAP |
| | Stromal Cells - | Stromal Cells | | | | XR |
| | unamplified | | | | | |
| S0026 | Stromal cell TF274 | stromal cell | Bone marrow | Cell Line | | Uni-ZAP |
| | | | | | | XR |
| S0027 | Smooth muscle, serum | Smooth muscle | Pulmanary | Cell Line | | Uni-ZAP |
| | treated | | artery | | | XR |
| S0028 | Smooth muscle,control | Smooth muscle | Pulmanary | Cell Line | | Uni-ZAP |
| | | | artery | | | XR |
| S0030 | Brain pons | Brain Pons | Brain | | | Uni-ZAP |
| | | | | | | XR |
| S0031 | Spinal cord | Spinal cord | spinal cord | | | Uni-ZAP |
| | | | | | | XR |
| S0032 | Smooth muscle-ILb | Smooth muscle | Pulmanary | Cell Line | | Uni-ZAP |
| | induced | artery | | | | XR |
| S0036 | Human Substantia Nigra | Human Substantia | | | | Uni-ZAP |
| | | Nigra | | | | XR |
| S0037 | Smooth muscle, ILIb | Smooth muscle | Pulmanary | Cell Line | | Uni-ZAP |
| | induced | | artery | | | XR |
| S0038 | Human Whole Brain #2 - | Human Whole Brain | | | | ZAP |
| | Oligo dT > 1.5Kb | #2 | | | | Express |
| S0040 | Adipocytes | Human Adipocytes | | | | Uni-ZAP |
| | | from Osteoclastoma | | | | XR |
| S0044 | Prostate BPH | prostate BPH | Prostate | | disease | Uni-ZAP |
| | | | | | | XR |
| S0045 | Endothelial cells-control | Endothelial cell | endothelial | Cell Line | | Uni-ZAP |
| | | | cell-lung | | | XR |
| S0046 | Endothelial-induced | Endothelial cell | endothelial | Cell Line | | Uni-ZAP |
| | | | cell-lung | | | XR |
| S0049 | Human Brain, Striatum | Human Brain, | | | | Uni-ZAP |
| | | Striatum | | | | XR |
| S0050 | Human Frontal Cortex, | Human Frontal | | | disease | Uni-ZAP |
| | Schizophrenia | Cortex, | | | | XR |
| | | Schizophrenia | | | | |
| S0051 | Human | Human | | | disease | Uni-ZAP |
| | Hypothalmus,Schizophren | Hypothalamus, | | | | XR |
| | ia | Schizophrenia | | | | |
| S0052 | neutrophils control | human neutrophils | blood | Cell Line | | Uni-ZAP |
| | | | | | | XR |
| S0053 | Neutrophils IL-I and LPS | human neutrophil | blood | Cell Line | | Uni-ZAP |
| | induced | induced | | | | XR |
| S0106 | STRIATUM | | BRAIN | | disease | Uni-ZAP |
| | DEPRESSION XR | | | | | |
| S0110 | Brain Amygdala | | Brain | | disease | Uni-ZAP |
| | Depression | | | | | XR |
| S0112 | Hypothalamus | | Brain | | | Uni-ZAP |
| | | | | | | XR |
| S0114 | Anergic T-cell | Anergic T-cell | | Cell Line | | Uni-ZAP |
| | | | | | | XR |
| S0116 | Bone marrow | Bone marrow | Bone marrow | | | Uni-ZAP |
| | | | | | | XR |
| S0126 | Osteoblasts | Osteoblasts | Knee | Cell Line | | Uni-ZAP |
| | | | | | | XR |
| S0132 | Epithelial-TNFa and INF | Airway Epithelial | | | | Uni-ZAP |
| | induced | | | | | XR |
| S0134 | Apoptotic T-cell | apoptotic cells | | Cell Line | | Uni-ZAP |
| | | | | | | XR |
| S0136 | PERM TF274 | stromal cell | Bone marrow | Cell Line | | Lambda |
| | | | | | | ZAP II |
| S0140 | eosinophil-IL5 induced | eosinophil | lung | Cell Line | | Uni-ZAP |
| | | | | | | XR |
| S0142 | Macrophage-oxLDL | macrophage- | blood | Cell Line | | Uni-ZAP |
| | | oxidized LDL | | | | XR |
| | | treated | | | | |
| S0144 | Macrophage (GM-CSF | Macrophage (GM- | | | | Uni-ZAP |
| | treated) | CSF treated) | | | | XR |
| S0146 | prostate-edited | prostate BPH | Prostate | | | Uni-ZAP |
| | | | | | | XR |
| S0148 | Normal Prostate | Prostate | prostate | | | Uni-ZAP |
| | | | | | | XR |
| S0150 | LNCAP prostate cell line | LNCAP Cell Line | Prostate | Cell Line | | Uni-ZAP |
| | | | | | | XR |
| S0152 | PC3 Prostate cell line | PC3 prostate cell | | | | Uni-ZAP |
| | | line | | | | XR |
| S0176 | Prostate, normal, | Prostate | prostate | | | Uni-ZAP |
| | subtraction I | | | | | XR |
| S0182 | Human B Cell 8866 | Human B- Cell 8866 | | | | Uni-ZAP |
| | | | | | | XR |
| S0192 | Synovial Fibroblasts | Synovial Fibroblasts | | | | pSport1 |
| | (control) | | | | | |
| S0194 | Synovial hypoxia | Synovial Fibroblasts | | | | pSport1 |
| S0196 | Synovial IL-l/TNF | Synovial Fibroblasts | | | | pSport1 |
| | stimulated | | | | | |
| S0198 | 7TM-pbfd | PBLS, 7TM | | | | PCRII |
| | | receptor enriched | | | | |
| S0202 | 7TM-pbdd | PBLS, 7TM | | | | PCRII |
| | | receptor enriched | | | | |
| S0206 | Smooth Muscle-HASTE | Smooth muscle | Pulmanary | Cell Line | | pBluescript |
| | normalized | | artery | | | |
| S0208 | Messangial cell, frac I | Messangial cell | | | | Sport1 |
| S0210 | Messangial cell, frac 2 | Messangial cell | | | | pSport1 |
| S0212 | Bone Marrow Stromal | Bone Marrow | | | | pSport1 |
| | Cell, untreated | Stromal | | | | |
| | | Cell,untreated | | | | |
| S0214 | Human Osteoclastoma, re- | Osteoclastoma | bone | | disease | Uni-ZAP |
| | excision | | | | | XR |
| S0216 | Neutrophils IL-1 and LPS | human neutrophil | blood | Cell Line | | Uni-ZAP |
| | induced | induced | | | | XR |
| S0218 | Apoptotic T-cell, re- | apoptotic cells | | Cell Line | | Uni-ZAP |
| | excision | | | | | XR |
| S0222 | H. Frontal | H. Brain, Frontal | Brain | | disease | Uni-ZAP |
| | cortex,epileptic;re- | Cortex, Epileptic | | | | XR |
| | excision | | | | | |
| S0228 | PSMIX | PBLS, 7TM | | | | PCRII |
| | | receptor enriched | | | | |
| S0242 | Synovial Fibroblasts | Synovial Fibroblasts | | | | pSport1 |
| | (II1/TNF), subt | | | | | |
| S0250 | Human Osteoblasts II | Human Osteoblasts | Femur | | disease | pCMVSport |
| | | | | | | 2.0 |
| S0252 | 7TM-PIMIX | PBLS, 7TM | | | | PCRII |
| | | receptor enriched | | | | |
| S0260 | Spinal Cord, re-excision | Spinal cord | spinal cord | | | Uni-ZAP |
| | | | | | | XR |
| S0264 | PPMIX | PPMIX (Human | Pituitary | | | PCRII |
| | | Pituitary) | | | | |
| S0268 | PRMIX | PRMIX (Human | prostate | | | PCRII |
| | | Prostate) | | | | |
| S0270 | PTMIX | PTMIX (Human | Thymus | | | PCRII |
| | | Thymus) | | | | |
| S0274 | PCMIX | PCMIX (Human | Brain | | | PCRII |
| | | Cerebellum) | | | | |
| S0276 | Synovial hypoxia-RSF | Synovial fobroblasts | Synovial | | | pSport1 |
| | subtracted | (rheumatoid) | tissue | | | |
| S0278 | H Macrophage (GM-CSF | Macrophage (GM- | | | | Uni-ZAP |
| | treated), re-excision | CSF treated) | | | | XR |
| S0280 | Human Adipose Tissue, | Human Adipose | | | | Uni-ZAP |
| | re-excision | Tissue | | | | XR |
| S0282 | Brain Frontal Cortex, re- | Brain frontal cortex | Brain | | | Lambda |
| | excision | | | | | ZAP II |
| S0300 | Frontal lobe,dementia;re- | Frontal Lobe | Brain | | | Uni-ZAP |
| | excision | dementia/Alzheimer″s | | | | XR |
| S0308 | Spleen/normal | Spleen normal | | | | pSport1 |
| S0314 | Human | Human | | | disease | pSport1 |
| | osteoarthritis;fraction I | osteoarthritic | | | | |
| | | cartilage | | | | |
| S0316 | Human Normal | Human Normal | | | | pSport1 |
| | Cartilage,Fraction I | Cartilage | | | | |
| S0318 | Human Normal Cartilage | Human Normal | | | | pSport1 |
| | Fraction II | Cartilage | | | | |
| S0328 | Palate carcinoma | Palate carcinoma | Uvula | | disease | Sport1 |
| S0330 | Palate normal | Palate normal | Uvula | | | pSport1 |
| S0332 | Pharynx carcinoma | Pharynx carcinoma | Hypopharynx | | | pSport1 |
| S0338 | Human Osteoarthritic | Human | | | disease | pSport1 |
| | Cartilage Fraction III | osteoarthritic | | | | |
| | | cartilage | | | | |
| S0342 | Adipocytes;re-excision | Human Adipocytes | | | | Uni-ZAP |
| | | from Osteoclastoma | | | | XR |
| S0344 | Macrophage-oxLDL; re- | macrophage- | blood | Cell Line | | Uni-ZAP |
| | excision | oxidized LDL | | | | XR |
| | | treated | | | | |
| S0346 | Human Amygdala;re- | Amygdala | | | | Uni-ZAP |
| | excision | | | | | XR |
| S0348 | Cheek Carcinoma | Cheek Carcinoma | | | disease | Sport1 |
| S0352 | Larynx Carcinoma | Larynx carcinoma | | | disease | pSport1 |
| S0354 | Colon Normal II | Colon Normal | Colon | | | pSport1 |
| S0356 | Colon Carcinoma | Colon Carcinoma | Colon | | disease | pSport1 |
| S0358 | Colon Normal III | Colon Normal | Colon | | | pSport1 |
| S0360 | Colon Tumor II | Colon Tumor | Colon | | disease | pSport1 |
| S0362 | Human Gastrocnemius | Gastrocnemius | | | | pSport1 |
| | | muscle | | | | |
| S0364 | Human Quadriceps | Quadriceps muscle | | | | pSport1 |
| S0366 | Human Soleus | Soleus Muscle | | | | pSport1 |
| S0372 | Larynx carcinoma III | Larynx carcinoma | | | disease | pSport1 |
| S0374 | Normal colon | Normal colon | | | | pSport1 |
| S0376 | Colon Tumor | Colon Tumor | | | disease | pSport1 |
| S0378 | Pancreas normal PCA4 | Pancreas Normal | | | | pSport1 |
| | No | PCA4No | | | | |
| S0380 | Pancreas Tumor PCA4 Tu | Pancreas Tumor | | | disease | pSport1 |
| | | PCA4 No | | | | |
| S0382 | Larynx carcinoma IV | Larynx carcinoma | | | disease | pSport1 |
| S0384 | Tongue carcinoma | Tongue carcinoma | | | disease | pSport1 |
| S0386 | Human Whole Brain, re- | Whole brain | Brain | | | ZAP |
| | excision | | | | | Express |
| S0388 | Human | Human | | | disease | Uni-ZAP |
| | Hypothalamus,schizophre | Hypothalamus, | | | | XR |
| | nia, re-excision | Schizophrenia | | | | |
| S0392 | Salivary Gland | Salivary gland; | | | | pSport1 |
| | | normal | | | | |
| S0400 | Brain; normal | Brain; normal | | | | pSport1 |
| S0402 | Adrenal Gland,normal | Adrenal gland; | | | | pSport1 |
| | | normal | | | | |
| S0404 | Rectum normal | Rectum, normal | | | | pSport1 |
| S0406 | Rectum tumour | Rectum tumour | | | | pSport1 |
| S0408 | Colon, normal | Colon, normal | | | | pSport1 |
| S0410 | Colon, tumour | Colon, tumour | | | | pSport1 |
| S0412 | Temporal cortex- | Temporal cortex, | | | disease | Other |
| | Alzheizmer; subtracted | alzheimer | | | | |
| S0414 | Hippocampus, Alzheimer | Hippocampus, | | | | Other |
| | Subtracted | Alzheimer | | | | |
| | | Subtracted | | | | |
| S0418 | CHME Cell Line;treated 5 | CHME Cell Line; | | | | pCMVSport |
| | hrs | treated | | | | 3.0 |
| S0420 | CHME Cell | CHME Cell line, | | | | pSport1 |
| | Line,untreated | untreatetd | | | | |
| S0422 | Mo7e Cell Line GM-CSF | Mo7e Cell Line | | | | pCMVSport |
| | treated (1 ng/ml) | GM-CSF treated | | | | 3.0 |
| | | (1 ng/ml) | | | | |
| S0424 | TF-1 Cell Line GM-CSF | TF-1 Cell Line | | | | pSport1 |
| | Treated | GM-CSF Treated | | | | |
| S0426 | Monocyte activated; re- | Monocyte-activated | blood | Cell Line | | Uni-ZAP |
| | excision | | | | | XR |
| S0428 | Neutrophils control; re- | human neutrophils | blood | Cell Line | | Uni-ZAP |
| | excision | | | | | XR |
| S0432 | Sinus piniformis Tumour | Sinus piniformis | | | | pSport1 |
| | | Tumour | | | | |
| S0434 | Stomach Normal | Stomach Normal | | | disease | pSporti |
| S0436 | Stomach Tumour | Stomach Tumour | | | disease | pSport1 |
| S0440 | Liver Tumour Met 5 Tu | Liver Tumour | | | | pSport1 |
| S0442 | Colon Normal | Colon Normal | | | | pSport1 |
| S0444 | Colon Tumor | Colon Tumour | | | disease | pSport1 |
| S0446 | Tongue Tumour | Tongue Tumour | | | | pSport1 |
| S0448 | Larynx Normal | Larynx Normal | | | | pSport1 |
| S0450 | Larynx Tumour | Larynx Tumour | | | | pSport1 |
| S0452 | Thymus | Thymus | | | | pSport1 |
| S0458 | Thyroid Normal (SDCA2 | Thyroid normal | | | | pSport1 |
| | No) | | | | | |
| S0464 | Larynx Normal | Larynx Normal | | | | pSport1 |
| S0470 | Adenocarcinoma | PYFD | | | disease | pSport1 |
| S0474 | Human blood platelets | Platelets | Blood | | | Other |
| | | | platelets | | | |
| S3012 | Smooth Muscle Serum | Smooth muscle | Pulmanary | Cell Line | | pBluescript |
| | Treated, Norm | | artery | | | |
| S3014 | Smooth muscle, serum | Smooth muscle | Pulmanary | Cell Line | | pBluescript |
| | induced,re-exc | | artery | | | |
| S6014 | H. hypothalamus, frac A | Hypothalamus | Brain | | | ZAP |
| | | | | | | Express |
| S6016 | H. Frontal Cortex, | H. Brain, Frontal | Brain | | disease | Uni-ZAP |
| | Epileptic | Cortex, Epileptic | | | | XR |
| S6026 | Frontal Lobe, Dementia | Frontal Lobe | Brain | | | Uni-ZAP |
| | | dementia/Alzheimer″s | | | | XR |
| S6028 | Human Manic Depression | Human Manic | Brain | | disease | Uni-ZAP |
| | Tissue | depression tissue | | | | XR |
| T0002 | Activated T-cells | Activated T-Cell, | Blood | Cell Line | | pBluescript |
| | | PBL fraction | | | | SK- |
| T0003 | Human Fetal Lung | Human Feral Lung | | | | pBluescript |
| | | | | | | SK- |
| T0004 | Human White Fat | Human White Fat | | | | pBluescript |
| | | | | | | SK- |
| T0006 | Human Pineal Gland | Human Pinneal | | | | pBluescript |
| | | Gland | | | | SK- |
| T0008 | Colorectal Tumor | Colorectal Tumor | | | disease | pBluescript |
| | | | | | | SK- |
| T0010 | Human Infant Brain | Human Infant Brain | | | Other | |
| T0023 | Human Pancreatic | Human Pancreatic | | | disease | pBluescript |
| | Carcinoma | Carcinoma | | | | SK- |
| T0039 | HSA 172 Cells | Human HSA172 cell | | | | pBluescript |
| | | line | | | | SK- |
| T0040 | HSC172 cells | SA172 Cells | | | | pBluescript |
| | | | | | | SK- |
| T0041 | Jurkat T-cell G1 phase | Jurkat T-cell | | | | pBluescript |
| | | | | | | SK- |
| T0042 | Jurkat T-Cell, S phase | Jurkat T-Cell Line | | | | pBluescript |
| | | | | | | SK- |
| T0048 | Human Aortic | Human Aortic | | | | pBluescript |
| | Endothelium | Endorhilium | | | | SK- |
| T0049 | Aorta endothelial cells + | Aorta endothelial | | | | pBluescript |
| | TNF-a | cells | | | | SK- |
| T0060 | Human White Adipose | Human White Fat | | | | pBluescript |
| | | | | | | SK- |
| T0067 | Human Thyroid | Human Thyroid | | | | pBluescript |
| | | | | | | SK- |
| T0069 | Human Uterus, normal | Human Uterus, | | | | pBluescript |
| | | normal | | | | SK- |
| T0071 | Human Bone Marrow | Human Bone | | | | pBluescnpt |
| | | Marrow | | | | SK- |
| T0082 | Human Adult Retina | Human Adult Retina | | | | pBluescript |
| | | | | | | SK- |
| T0109 | Human (HCC) cell line | | | | | pBluescript |
| | liver (mouse) metastasis, | | | | | SK- |
| | remake | | | | | |
| T0110 | Human colon carcinoma | | | | | pBluescript |
| | (HCC) cell line, remake | | | | | SK- |
| T0114 | Human (Caco-2) cell line, | | | | | pBluescript |
| | adenocarcinoma, colon, | | | | | SK- |
| | remake | | | | | |
| T0115 | Human Colon Carcinoma | | | | | pBluescript |
| | (HCC) cell line | | | | | SK- |
| L0002 | Atrium cDNA library | | | | | |
| | Human heart | | | | | |
| L0005 | Clontech human aorta | | | | | |
| | polyA + mRNA (#6572) | | | | | |
| L0021 | Human adult (K.Okubo) | | | | | |
| L0022 | Human adult lung 3″ | | | | | |
| | directed MboI cDNA | | | | | |
| L0040 | Human colon mucosa | | | | | |
| L0055 | Human promyelocyte | | | | | |
| L0065 | Liver HepG2 cell line. | | | | | |
| L0097 | Subtracted human retinal | | | | | |
| | pigment epithelium (RPE) | | | | | |
| L0105 | Human aorta polyA + | aorta | | | | |
| | (TFujiwara) | | | | | |
| L0118 | Human fetal brain S. | brain | | | | |
| | Meier-Ewert | | | | | |
| L0142 | Human placenta cDNA | placenta | | | | |
| | (TFujiwara) | | | | | |
| L0151 | Human testis (C. De | testis | | | | |
| | Smet) | | | | | |
| L0157 | Human fetal brain | | brain | | | |
| | (TFujiwara) | | | | | |
| L0163 | Human heart cDNA | | heart | | | |
| | (YNakamura) | | | | | |
| L0193 | Human osteosarcoma | osteosarcoma | | OsA-CL | | |
| | EGracia | | | | | |
| L0352 | Normalized infant brain, | | | | | BA, M13- |
| | Bento Soares | | | | | derived |
| L0355 | P, Human foetal Brain | | | | | Bluescript |
| | Whole tissue | | | | | |
| L0361 | Stratagene ovary | | ovary | | | Bluescript |
| | (#937217) | | | | | SK |
| L0362 | Stratagene ovarian cancer | | | | | Bluescript |
| | (#937219) SK- | | | | | |
| L0366 | Stratagene schizo brain | schizophrenic brain | | | | Bluescript |
| | S11 | S-11 frontal lobe | | | | SK- |
| L0367 | NCI_CGAP_Sch1 | Schwannoma tumor | | | | Bluescript |
| | | | | | | SK- |
| L0369 | NCI_CGAP_AA1 | adrenal adenoma | adrenal gland | | | Bluescript |
| | | | | | | SK- |
| L0370 | Johnston frontal cortex | pooled frontal lobe | brain | | | Bluescript |
| | | | | | | SK |
| L0372 | NCI_CGAP_Co12 | colon tumor | colon | | | Bluescript |
| | | | | | | SK |
| L0373 | NCI_CGAP_Co11 | tumor | colon | | | Bluescript |
| | | | | | | SK |
| L0374 | NCI_CGAP_Co2 | tumor | colon | | | Bluescript |
| | | | | | | SK |
| L0375 | NCI_CGAP_Kid6 | kidney tumor | kidney | | | Bluescript |
| | | | | | | SK- |
| L0378 | NCI_CGAP_Lu1 | lung tumor | lung | | | Bluescript |
| | | | | | | SK- |
| L0381 | NCI_CGAP_HN4 | squamous cell | pharynx | | | Bluescript |
| | | carcinoma | | | | SK- |
| L0382 | NCI_CGAP_Pr25 | epithelium (cell line) | prostate | | | Bluescript |
| | | | | | | SK- |
| L0384 | NCI_CGAP_Pr23 | prostate tumor | prostate | | | Bluescript |
| | | | | | | SK- |
| L0386 | NCI_CGAP_HN3 | squamous cell | tongue | | | Bluescnpt |
| | | carcinoma from base | | | | SK- |
| | | of tongue | | | | |
| L0387 | NCI_CGAP_GCB0 | germinal center B- | tonsil | | | Bluescnpt |
| | | cells | | | | SK- |
| L0388 | NCI_CGAP_HN6 | normal gingiva (cell | | | | Bluescript |
| | | line from | | | | SK- |
| | | immortalized kerati | | | | |
| L0389 | NCI_CGAP_HN5 | normal gingiva (cell | | | | Bluescript |
| | | line from primaxy | | | | SK- |
| | | keratinocyt | | | | |
| L0393 | B, Human Liver tissue | | | | | gt11 |
| L0435 | Infant brain, LLNL array | | | | | lafmid BA |
| | of Dr. M. Soares 1NIB | | | | | |
| L0438 | normalized infant brain | total brain | brain | | | lafmid BA |
| | cDNA | | | | | |
| L0439 | Soares infant brain 1NIB | | whole brain | | | Lafmid BA |
| L0455 | Human retina cDNA | retina | eye | | | lambda gt10 |
| | randomly primed | | | | | |
| | sublibrary | | | | | |
| L0456 | Human retina cDNA | retina | eye | | | lambda gt10 |
| | Tsp509I-cleaved | | | | | |
| | sublibrary | | | | | |
| L0462 | WATM1 | | | | | lambda gt11 |
| L0465 | TEST 1, Human adult | | | | | lambda |
| | Testis tissue | | | | | nml 149 |
| L0469 | T, Human adult | | | | | Lambda |
| | Rhabdomyosarcoma cell- | | | | | Zap |
| | line | | | | | |
| L0471 | Human fetal heart, | | | | | Lambda |
| | Lambda ZAP Express | | | | | ZAP |
| | | | | | | Express |
| L0483 | Human pancreatic islet | | | | | Lambda |
| | | | | | | ZAPII |
| L0485 | STRATAGENE Human | skeletal muscle | leg muscle | | | Lambda |
| | skeletal muscle cDNA | | | | | ZAPII |
| | library, cat. #936215. | | | | | |
| L0499 | NCI_CGAP_HSC2 | stem cell 34+/38+ | bone marrow | | | pAMP1 |
| L0509 | NCI_CGAP_Lu26 | invasive | lung | | | pAMP1 |
| | | adenocarcinoma | | | | |
| L0512 | NCI_CGAP_Ov36 | borderline ovarian | ovary | | | pAMP1 |
| | | carcinoma | | | | |
| L0513 | NCI_CGAP_Ov37 | early stage papillary | ovary | | | pAMP1 |
| | | serous carcinoma | | | | |
| L0517 | NCI_CGAP_Pr1 | | | | | pAMP10 |
| L0518 | NCI_CGAP_Pr2 | | | | | pAMP10 |
| L0519 | NCI_CGAP_Pr3 | | | | | pAMP10 |
| L0520 | NCI_CGAP_Alv1 | alveolar | | | | pAMP10 |
| | | rhabdomyosarcoma | | | | |
| L0521 | NCI_CGAP_Ew1 | Ewing″s sarcoma | | | | pAMP10 |
| L0522 | NCI_CGAP_Kid1 | kidney | | | | pAMP10 |
| L0523 | NCI_CGAP_Lip2 | liposarcoma | | | | pAMP10 |
| L0526 | NCI_CGAP_Pr12 | metastatic prostate | | | | pAMP10 |
| | | bone lesion | | | | |
| L0527 | NCI_CGAP_Ov2 | ovary | | | | pAMP10 |
| L0528 | NCI_CGAP_Pr5 | prostate | | | | pAMP10 |
| L0529 | NCI_CGAP_Pr6 | prostate | | | | pAMP10 |
| L0534 | Chromosome 7 Fetal | brain | brain | | | pAMP10 |
| | Brain cDNA Library | | | | | |
| L0535 | NCI_CGAP_Br5 | infiltrating ductal | breast | | | pAMP10 |
| | | carcinoma | | | | |
| L0542 | NCI_CGAP_Pr11 | normal prostatic | prostate | | | pAMP10 |
| | | epithelial cells | | | | |
| L0543 | NCI_CGAP_Pr9 | normal prostatic | prostate | | | pAMP10 |
| | | epithelial cells | | | | |
| L0544 | NCI_CGAP_Pr4 | prostatic | prostate | | | pAMP10 |
| | | intraepithelial | | | | |
| | | neoplasia - high | | | | |
| | | grade | | | | |
| L0545 | NCI_CGAP_Pr4.1 | prostatic | prostate | | | pAMP10 |
| | | intraepithelial | | | | |
| | | neoplasia - high | | | | |
| | | grade | | | | |
| L0549 | NCI_CGAP_HN10 | carcinoma in situ | | | | pAMP10 |
| | | from retromolar | | | | |
| | | trigone | | | | |
| L0551 | NCI_CGAP_HN7 | normal squamous | | | | pAMP10 |
| | | epithelium, floor of | | | | |
| | | mouth | | | | |
| L0555 | NCI_CGAP_Lu34 | large cell carcinoma | lung | | | pAMP10 |
| L0557 | NCI_CGAP_Lu21 | small cell carcinoma | lung | | | pAMP10 |
| L0558 | NCI_CGAP_Ov40 | endometrioid | ovary | | | pAMP10 |
| | | ovarian metastasis | | | | |
| L0564 | Jia bone marrow stroma | bone marrow stroma | | | | pBluescript |
| L0565 | Normal Human | Bone | Hip | | | pBluescript |
| | Trabecular Bone Cells | | | | | |
| L0581 | Stratagene liver (#937224) | | liver | | | pBluescript |
| | | | | | | SK |
| L0586 | HTCDL1 | | | | | pBluescript |
| | | | | | | SK(-) |
| L0587 | Stratagene colon HT29 | | | | | pBluescript |
| | (#937221) | | | | | SK- |
| L0588 | Stratagene endothelial cell | | | | | pBluescript |
| | 937223 | | | | | SK- |
| L0589 | Stratagene fetal retina | | | | | pBluescript |
| | 937202 | | | | | SK- |
| L0590 | Stratagene fibroblast | | | | | pBluescript |
| | (#937212) | | | | | SK- |
| L0591 | Stratagene HeLa cell s3 | | | | | pBluescript |
| | 937216 | | | | | SK- |
| L0592 | Stratagene hNT neuron | | | | | pBluescript |
| | (#937233) | | | | | SK- |
| L0593 | Stratagene | | | | | pBluescript |
| | neuroepithelium | | | | | SK- |
| | (#937231) | | | | | |
| L0594 | Stratagene | | | | | pBluescript |
| | neuroepithelium | | | | | SK- |
| | NT2RAMI 937234 | | | | | |
| L0595 | Stratagene NT2 neuronal | neuroepirhelial cells | brain | | | pBluescript |
| | precursor 937230 | | | | | SK- |
| L0596 | Stratagene colon | | colon | | | pBluescript |
| | (#937204) | | | | | SK- |
| L0597 | Stratagene corneal stroma | | cornea | | | pBluescript |
| | (#937222) | | | | | SK- |
| L0598 | Morton Fetal Cochlea | cochlea | ear | | | pBluescript |
| | | | | | | SK- |
| L0599 | Stratagene lung (#937210) | | lung | | | pBluescript |
| | | | | | | SK- |
| L0600 | Weizmann Olfactory | olfactory epithelium | nose | | | pBluescript |
| | Epithelium | | | | | SK- |
| L0601 | Straragene pancreas | | pancreas | | | pBluescript |
| | (#937208) | | | | | SK- |
| L0602 | Pancreatic Islet | pancreatic islet | pancreas | | | pBluescript |
| | | | | | | SK- |
| L0603 | Stratagene placenta | | placenta | | | pBluescript |
| | (#937225) | | | | | SK- |
| L0604 | Stratagene muscle 937209 | muscle | skeletal | | | pBluescript |
| | | | muscle | | | SK- |
| L0605 | Stratagene fetal spleen | fetal spleen | spleen | | | pBluescript |
| | (#937205) | | | | | SK- |
| L0606 | NCI_CGAP_Lym5 | follicular lymphoma | lymph node | | | pBluescript |
| | | | | | | SK- |
| L0607 | NCI_CGAP_Lym6 | mantle cell | lymph node | | | pBluescript |
| | | lymphoma | | | | SK- |
| L0608 | Stratagene lung carcinoma | lung carcinoma | lung | NCI-H69 | | pBluescript |
| | 937218 | | | | | SK- |
| L0617 | Chromosome 22 exon | | | | | pBluescript1 |
| | | | | | | IKS+ |
| L0619 | Chromosome 9 exon II | | | | | pBluescript1 |
| | | | | | | IKS+ |
| L0622 | HM1 | | | | | pcDNAII |
| | | | | | | (Invitrogen) |
| L0625 | NCI_CGAP_AR1 | bulk alveolar tumor | | | | pCMV- |
| | | | | | | SPORT2 |
| L0627 | NCI_CGAP_Co1 | bulk tumor | colon | | | pCMV- |
| | | | | | | SPORT2 |
| L0628 | NCI_CGAP_Ov1 | ovary bulk tumor | ovary | | | pCMV- |
| | | | | | | SPORT2 |
| L0629 | NCI_CGAP_Mel3 | metastatic | bowel (skin | | | pCMV- |
| | | melanoma to bowel | primary) | | | SPORT4 |
| L0631 | NCI_CGAP_Br7 | | breast | | | pCMV- |
| | | | | | | SPORT4 |
| L0635 | NCI_CGAP_PNS1 | dorsal root ganglion | peripheral | | | pCMV- |
| | | | nervous | | | SPORT4 |
| | | | system | | | |
| L0636 | NCI_CGAP_Pit1 | four pooled pituitary | brain | | | pCMV- |
| | | adenomas | | | | SPORT6 |
| L0637 | NCI_CGAP_Brn53 | three pooled | brain | | | pCMV- |
| | | meningiomas | | | | SPORT6 |
| L0638 | NCI_CGAP_Brn35 | tumor, 5 pooled (see | brain | | | pCMV- |
| | | description) | | | | SPORT6 |
| L0639 | NCI_CGAP_Brn52 | tumor, 5 pooled (see | brain | | | pCMV- |
| | | description) | | | | SPORT6 |
| L0640 | NCI_CGAP_Br18 | four pooled high- | breast | | | pCMV- |
| | | grade tumors, | | | | SPORT6 |
| | | including two prima | | | | |
| L0641 | NCI_CGAP_Co17 | juvenile granulosa | colon | | | pCMV- |
| | | tumor | | | | SPORT6 |
| L0642 | NCI_CGAP_Co18 | moderately | colon | | | pCMV- |
| | | differentiated | | | | SPORT6 |
| | | adenocarcinoma | | | | |
| L0643 | NCI_CGAP_Co19 | moderately | colon | | | pCMV- |
| | | differentiated | | | | SPORT6 |
| | | adenocarcinoma | | | | |
| L0644 | NCI_CGAP_Co20 | moderately | colon | | | pCMV- |
| | | differentiated | | | | SPORT6 |
| | | adenocarcinoma | | | | |
| L0645 | NCI_CGAP_Co21 | moderately | colon | | | pCMV- |
| | | differentiated | | | | SPORT6 |
| | | adenocarcinoma | | | | |
| L0646 | NCI_CGAP_Co14 | moderately- | colon | | | pCMV- |
| | | differentiated | | | | SPORT6 |
| | | adenocarcinoma | | | | |
| L0647 | NCI_CGAP_Sar4 | five pooled | connective | | | pCMV- |
| | | sarcomas, including | tissue | | | SPORT6 |
| | | myxoid liposarcoma | | | | |
| L0648 | NCI_CGAP_Eso2 | squamous cell | esophagus | | | pCMV- |
| | | carcinoma | | | | SPORT6 |
| L0649 | NCI_CGAP_GU1 | 2 pooled high-grade | genitourinary | | | pCMV- |
| | | transitional cell | tract | | | SPORT6 |
| | | tumors | | | | |
| L0650 | NCI_CGAP_Kid13 | 2 pooled Wilms″ | kidney | | | pCMV- |
| | | tumors, one primary | | | | SPORT6 |
| | | and one metast | | | | |
| L0651 | NCI_CGAP_Kid8 | renal cell tumor | kidney | | | pCMV- |
| | | | | | | SPORT6 |
| L0653 | NCI_CGAP_Lu28 | two pooled | lung | | | pCMV- |
| | | squamous cell | | | | SPORT6 |
| | | carcinomas | | | | |
| L0655 | NCI_CGAP_Lym12 | lymphoma, | lymph node | | | pCMV- |
| | | follicular mixed | | | | SPORT6 |
| | | small and large cell | | | | |
| L0656 | NCI_CGAP_Ov38 | normal epithelium | ovary | | | pCMV- |
| | | | | | | SPORT6 |
| L0657 | NCI_CGAP_Ov23 | tumor, 5 pooled (see | ovary | | | pCMV- |
| | | description) | | | | SPORT6 |
| L0658 | NCI_CGAP_Ov35 | tumor, 5 pooled (see | ovary | | | pCMV- |
| | | description) | | | | SPORT6 |
| L0659 | NCI_CGAP_Pan1 | adenocarcinoma | pancreas | | | pCMV- |
| | | | | | | SPORT6 |
| L0661 | NCI_CGAP_Mel15 | malignant | skin | | | pCMV- |
| | | melanoma, | | | | SPORT6 |
| | | metastatic to lymph | | | | |
| | | node | | | | |
| L0662 | NCI_CGAP_Gas4 | poorly differentiated | stomach | | | pCMV- |
| | | adenocarcinoma | | | | SPORT6 |
| | | with signet r | | | | |
| L0663 | NCI_CGAP_Ut2 | moderately- | uterus | | | pCMV- |
| | | differentiated | | | | SPORT6 |
| | | endometrial | | | | |
| | | adenocarcino | | | | |
| L0664 | NCI_CGAP_Ut3 | poorly-differentiated | uterus | | | pCMV- |
| | | endometrial | | | | SPORT6 |
| | | adenocarcinoma. | | | | |
| L0665 | NCI_CGAP_Ut4 | serous papillary | uterus | | | pCMV- |
| | | carcinoma, high | | | | SPORT6 |
| | | grade, 2 pooled t | | | | |
| L0666 | NCI_CGAP_Ut1 | well-differentiated | uterus | | | pCMV- |
| | | endometrial | | | | SPORT6 |
| | | adenocarcinoma, 7 | | | | |
| L0667 | NCI_CGAP_CML1 | myeloid cells, 18 | whole blood | | | pCMV- |
| | | pooled CML cases, | | | | SPORT6 |
| | | BCR/ABL rearra | | | | |
| L0686 | Stanley Frontal SN pool 2 | frontal lobe (see | brain | | | pCR2.1- |
| | | description) | | | | TOPO |
| | | | | | | (Invitrogen) |
| L0695 | Human Glialblastoma Cell | | Brain | BT-325 | | PCRII, |
| | | | | | | Invitrogen |
| L0698 | Testis 2 | | | | | PGEM |
| | | | | | | 5zf(+) |
| L0717 | Gessler Wilms tumor | | | | | pSPORT1 |
| L0720 | PN001-Normal Human | | prostate | | | pSport1 |
| | Prostate | | | | | |
| L0731 | Soares_pregnant_uterus | | uterus | | | pT7T3-Pac |
| | NbHPU | | | | | |
| L0740 | Soares melanocyte | melanocyte | | | | pT7T3D |
| | 2NbHM | (Pharmacia) | | | | |
| | | | | | | with a |
| | | | | | | modified |
| | | | | | | polylinker |
| L0741 | Soares adult brain | | brain | pT7T3D | | |
| | N2b4HB55Y | | | | | (Pharmacia) |
| | | | | | | with a |
| | | | | | | modified |
| | | | | | | polylinker |
| L0742 | Soares adult brain | | brain | pT7T3D | | |
| | N2b5HB55Y | | | | | (Pharmacia) |
| | | | | | | with a |
| | | | | | | modified |
| | | | | | | polylinker |
| L0743 | Soares breast 2NbHBst | | breast | pT7T3D | | |
| | | | | | | (Pharmacia) |
| | | | | | | with a |
| | | | | | | modified |
| | | | | | | polylinker |
| L0744 | Soares breast 3NbHBst | | breast | pT7T3D | | |
| | | | | | | (Pharmacia) |
| | | | | | | with a |
| | | | | | | modified |
| | | | | | | polylinker |
| L0745 | Soares retina N2b4HR | retina | eye | | | pT7T3D |
| | | | | | | (Pharmacia) |
| | | | | | | with a |
| | | | | | | modified |
| | | | | | | polylinker |
| L0746 | Soares retina N2b5HR | retina | eye | | | pT7T3D |
| | | | | | | (Pharmacia) |
| | | | | | | with a |
| | | | | | | modified |
| | | | | | | polylinker |
| L0747 | Soares_fetal_heart_NbHH | | heart | | | pT7T3D |
| | 19W | | | | | (Pharmacia) |
| | | | | | | with a |
| | | | | | | modified |
| | | | | | | polylinker |
| L0748 | Soares fetal liver spleen | | Liver and | | | pT7T3D |
| | INFLS | | Spleen | | | (Pharmacia) |
| | | | | | | with a |
| | | | | | | modified |
| | | | | | | polylinker |
| L0749 | Soares_fetal_liver_spleen | | Liver and | | | pT7T3D |
| | _1NFLS_S1 | | Spleen | | | (Pharmacia) |
| | | | | | | with a |
| | | | | | | modified |
| | | | | | | polylinker |
| L0750 | Soares_fetal_lung_NbHL1 | | lung | | | pT7T3D |
| | 9W | | | | | (Pharmacia) |
| | | | | | | with a |
| | | | | | | modified |
| | | | | | | polylinker |
| L0751 | Soares ovary tumor | ovarian tumor | ovary | | | pT7T3D |
| | NbHOT | | | | | (Pharmacia) |
| | | | | | | with a |
| | | | | | | modified |
| | | | | | | polylinker |
| L0752 | Soares_parathyroid_tumor | parathyroid tumor | parathyroid | | | pT7T3D |
| | _NbHPA | | gland | | | (Pharmacia) |
| | | | | | | with a |
| | | | | | | modified |
| | | | | | | polylinker |
| L0753 | Soares_pineal_gland_N3H | | pineal gland | | | pT7T3D |
| | PG | | | | | (Pharmacia) |
| | | | | | | with a |
| | | | | | | modified |
| | | | | | | polylinker |
| L0754 | Soares placenta Nb2HP | | placenta | | | pT7T3D |
| | | | | | | (Pharmacia) |
| | | | | | | with a |
| | | | | | | modified |
| | | | | | | polylinker |
| L0755 | Soares_placenta_8to9wee | | placenta | | | pT7T3D |
| | ks_2NbHP8to9W | | | | | (Pharmacia) |
| | | | | | | with a |
| | | | | | | modified |
| | | | | | | polylinker |
| L0756 | Soares_multiple_sclerosis | multiple sclerosis | pT7T3D | | | |
| | _2NbHMSP | lesions | | | | (Pharmacia) |
| | | | | | | with a |
| | | | | | | modified |
| | | | | | | polylinker |
| | | | | | | V TYPE |
| L0757 | Soares_senescent_fibrobla | senescent fibroblast | pT7T3D | | | |
| | sts_NbHSF | | | | | (Pharmacia) |
| | | | | | | with a |
| | | | | | | modified |
| | | | | | | polylinker |
| | | | | | | V TYPE |
| L0758 | SoarestestisNHT | | | | | pT7TJD- |
| | | | | | | Pac |
| | | | | | | (Pharmacia) |
| | | | | | | with a |
| | | | | | | modified |
| | | | | | | polylinker |
| L0759 | Soares_total_fetus_Nb2H | | | | | pT7T3 D- |
| | F8_9w | | | | | Pac |
| | | | | | | (Pharmacia) |
| | | | | | | with a |
| | | | | | | modified |
| | | | | | | polylinker |
| L0760 | Barstead aorta HPLRB3 | aorta | | | | pT7T3D- |
| | | | | | | Pac |
| | | | | | | (Pharmacia) |
| | | | | | | with a |
| | | | | | | modified |
| | | | | | | polylinker |
| L0761 | NGI_CGAP_CLL1 | B-cell, chronic | | | | pT7T3D- |
| | | lymphotic leukemia | | | | Pac |
| | | | | | | (Pharmacia) |
| | | | | | | with a |
| | | | | | | modified |
| | | | | | | polylinker |
| L0762 | NCI_CGAP_Brl.1 | breast | | | | pT7T3D- |
| | | | | | | Pac |
| | | | | | | (Pharmacia) |
| | | | | | | with a |
| | | | | | | modified |
| | | | | | | polylinker |
| L0763 | NCI_CGAP_Br2 | breast | | | | pT7T3D- |
| | | | | | | Pac |
| | | | | | | (Pharmacia) |
| | | | | | | with a |
| | | | | | | modified |
| | | | | | | polylinker |
| L0764 | NCI_CGAP_Co3 | colon | | | | pT7T3D- |
| | | | | | | Pac |
| | | | | | | (Pharmacia) |
| | | | | | | with a |
| | | | | | | modified |
| | | | | | | polylinker |
| L0765 | NCI_CGAP_Co4 | colon | | | | pT7T3D- |
| | | | | | | Pac |
| | | | | | | (Pharmacia) |
| | | | | | | with a |
| | | | | | | modified |
| | | | | | | polylinker |
| L0766 | NCI_CGAP_GCB1 | germinal center B | | | | pT7T3D- |
| | | cell | | | | Pac |
| | | | | | | (Pharmacia) |
| | | | | | | with a |
| | | | | | | modified |
| | | | | | | polylinker |
| L0767 | NCI_CGAP_GC3 | pooled germ cell | | | | pT7T3D- |
| | | tumors | | | | Pac |
| | | | | | | (Pharmacia) |
| | | | | | | with a |
| | | | | | | modified |
| | | | | | | polylinker |
| L0768 | NCI_CGAP_GC4 | pooled germ cell | | | | pT7T3D- |
| | | tumors | | | | Pac |
| | | | | | | (Pharmacia) |
| | | | | | | with a |
| | | | | | | modified |
| | | | | | | polylinker |
| L0769 | NCI_CGAP_Brn25 | anaplastic | brain | | | pT7T3D- |
| | | oligodendroglioma | | | | Pac |
| | | | | | | (Pharmacia) |
| | | | | | | with a |
| | | | | | | modified |
| | | | | | | polylinker |
| L0770 | NCI_CGAP_Brn23 | glioblastoma | brain | | | pT7T3D- |
| | | (pooled) | | | | Pac |
| | | | | | | (Pharmacia) |
| | | | | | | with a |
| | | | | | | modified |
| | | | | | | polylinker |
| L0771 | NCI_CGAP_Co8 | adenocarcinoma | colon | | | pT7T3D- |
| | | | | | | Pac |
| | | | | | | (Pharmacia) |
| | | | | | | with a |
| | | | | | | modified |
| | | | | | | polylinker |
| L0772 | NCI_CGAP_Co10 | colon tumor RER+ | colon | | | pT7T3D- |
| | | | | | | Pac |
| | | | | | | (Pharmacia) |
| | | | | | | with a |
| | | | | | | modified |
| | | | | | | polylinker |
| L0773 | NCI_CGAP_Co9 | colon tumor RER+ | colon | | | pT7T3D- |
| | | | | | | Pac |
| | | | | | | (Pharmacia) |
| | | | | | | with a |
| | | | | | | modified |
| | | | | | | polylinker |
| L0774 | NCI_CGAP_Kid3 | | kidney | | | pT7T3D- |
| | | | | | | Pac |
| | | | | | | (Pharmacia) |
| | | | | | | with a |
| | | | | | | modified |
| | | | | | | polylinker |
| L0775 | NCI_CGAP_Kid5 | 2 pooled tumors | kidney | | | pT7T3D- |
| | | (clear cell type) | | | | Pac |
| | | | | | | (Pharmacia) |
| | | | | | | with a |
| | | | | | | modified |
| | | | | | | polylinker |
| L0776 | NCI_CGAP_Lu5 | carcinoid | lung | | | pT7T3D- |
| | | | | | | Pac |
| | | | | | | (Pharmacia) |
| | | | | | | with a |
| | | | | | | modified |
| | | | | | | polylinker |
| L0777 | Soares_NhHMPu_S1 | Pooled human | mixed (see | | | pT7T3D- |
| | | melanocyte, fetal | below) | | | Pac |
| | | heart, and pregnant | | | | (Pharmacia) |
| | | | | | | with a |
| | | | | | | modified |
| | | | | | | polylinker |
| L0779 | Soares_NFL_T_GBC_S1 | | pooled | | | pT7T3D- |
| | | | | | | Pac |
| | | | | | | (Pharmacia) |
| | | | | | | with a |
| | | | | | | modified |
| | | | | | | polylinker |
| L0780 | Soares_NSF_F8_9W_OT | | pooled | | | pT7T3D- |
| | _PA_P_S1 | | | | | Pac |
| | | | | | | (Pharmacia) |
| | | | | | | with a |
| | | | | | | modified |
| | | | | | | polylinker |
| L0783 | NCI_CGAP_Pr22 | normal prostate | prostate | | | pT7T3D- |
| | | | | | | Pac |
| | | | | | | (Pharmacia) |
| | | | | | | with a |
| | | | | | | modified |
| | | | | | | polylinker |
| L0784 | NCI_CGAP_Lei2 | leiomyosarcoma | soft tissue | | | pT7T3D- |
| | | | | | | Pac |
| | | | | | | (Pharmacia) |
| | | | | | | with a |
| | | | | | | modified |
| | | | | | | polylinker |
| L0785 | Barstead spleen HPLRB2 | | spleen | | | pT7T3D- |
| | | | | | | Pac |
| | | | | | | (Pharmacia) |
| | | | | | | with a |
| | | | | | | modified |
| | | | | | | polylinker |
| L0786 | Soares_NbHFB | | whole brain | | | pT7T3D- |
| | | | | | | Pac |
| | | | | | | (Pharmacia) |
| | | | | | | with a |
| | | | | | | modified |
| | | | | | | polylinker |
| L0787 | NCI_CGAP_Sub1 | | | | | pT7T3D- |
| | | | | | | Pac |
| | | | | | | (Pharmacia) |
| | | | | | | with a |
| | | | | | | modified |
| | | | | | | polylinker |
| L0788 | NCI_CGAP_Sub2 | | | | | pT7T3D- |
| | | | | | | Pac |
| | | | | | | (Pharmacia) |
| | | | | | | with a |
| | | | | | | modified |
| | | | | | | polylinker |
| L0789 | NCI_CGAP_Sub3 | | | | | pT7T3D- |
| | | | | | | Pac |
| | | | | | | (Pharmacia) |
| | | | | | | with a |
| | | | | | | modified |
| | | | | | | polylinker |
| L0790 | NCI_CGAP_Sub4 | | | | | pT7T3D- |
| | | | | | | Pac |
| | | | | | | (Pharmacia) |
| | | | | | | with a |
| | | | | | | modified |
| | | | | | | polylinker |
| L0791 | NCI_CGAP_Sub5 | | | | | pT7T3D- |
| | | | | | | Pac |
| | | | | | | (Pharmacia) |
| | | | | | | with a |
| | | | | | | modified |
| | | | | | | polylinker |
| L0792 | NCI_CGAP_Sub6 | | | | | pT7T3D- |
| | | | | | | Pac |
| | | | | | | (Pharmacia) |
| | | | | | | with a |
| | | | | | | modified |
| | | | | | | polylinker |
| L0794 | NCI_CGAP_GC6 | pooled germ cell | | | | pT7T3D- |
| | | tumors | | | | Pac |
| | | | | | | (Pharmacia) |
| | | | | | | with a |
| | | | | | | modified |
| | | | | | | polylinker |
| L0796 | NCI_CGAP_Brn50 | medulloblastoma | brain | | | pT7T3D- |
| | | | | | | Pac |
| | | | | | | (Pharmacia) |
| | | | | | | with a |
| | | | | | | modified |
| | | | | | | polylinker |
| L0800 | NCI_CGAP_Co16 | colon tumor, RER+ | colon | | | pT7T3D- |
| | | | | | | Pac |
| | | | | | | (Pharmacia) |
| | | | | | | with a |
| | | | | | | modified |
| | | | | | | polylinker |
| L0803 | NCI_CGAP_Kid11 | | kidney | | | pT7T3D- |
| | | | | | | Pac |
| | | | | | | (Pharmacia) |
| | | | | | | with a |
| | | | | | | modified |
| | | | | | | polylinker |
| L0804 | NCI_CGAP_Kid12 | 2 pooled tumors | kidney | | | pT7T3D- |
| | | (clear cell type) | | | | Pac |
| | | | | | | (Pharmacia) |
| | | | | | | with a |
| | | | | | | modified |
| | | | | | | polylinker |
| L0805 | NCI_CGAP_Lu24 | carcinoid | lung | | | pT7T3D- |
| | | | | | | Pac |
| | | | | | | (Pharmacia) |
| | | | | | | with a |
| | | | | | | modified |
| | | | | | | polylinker |
| L0806 | NCI_CGAP_Lu19 | squamous cell | lung | | | pT7T3D- |
| | | carcinoma, poorly | | | | Pac |
| | | differentiated (4 | | | | (Pharmacia) |
| | | | | | | with a |
| | | | | | | modified |
| | | | | | | polylinker |
| L0808 | Barstead prostate BPH | | prostate | | | pT7T3D- |
| | HPLRB4 1 | | | | | Pac |
| | | | | | | (Pharmacia) |
| | | | | | | with a |
| | | | | | | modified |
| | | | | | | polylinker |
| L0809 | NCI_CGAP_Pr28 | | prostate | | | pT7T3D- |
| | | | | | | Pac |
| | | | | | | (Pharmacia) |
| | | | | | | with a |
| | | | | | | modified |
| | | | | | | polylinker |
| L2250 | Human cerebral cortex | cerebral cortex | | | | |

[0086] TABLE 5

| OMIM | |
|---|---|
| Reference | Description |
| 100730 | Myasthenia gravis, neonatal transient |
| 106165 | Hypertension, essential, 145500 |
| 107280 | Cerebrovascular disease, occlusive |
| 107280 | Alpha-1-antichymotrypsin deficiency |
| 107400 | Emphysema |
| 107400 | Emphysema-cirrhosis |
| 117700 | [Hypoceruloplasminemia, hereditary] |
| 117700 | Hemosiderosis, systemic, due to aceruloplasminemia |
| 118800 | Choreoathetosis, familial paroxysmal |
| 121050 | Contractural arachnodactyly, congenital |
| 122500 | [Transcortin deficiency] |
| 123660 | Cataract, Coppock-like |
| 129490 | Ectodermal dysplasia-3, anhidrotic |
| 131400 | Eosinophilia, familial |
| 135600 | Ehlers-Danlos syndrome, type X |
| 138040 | Cortisol resistance |
| 150210 | Lactoferrin-deficient neutrophils, 245480 |
| 153455 | Cutis laxa, recessive, type I, 219100 |
| 154705 | Marfan syndrome, type II |
| 157655 | Lactic acidosis due to defect in |
| | iron-sulfur cluster of complex I |
| 159000 | Muscular dystrophy, limb-girdle, type 1A |
| 169600 | Hailey-Hailey disease |
| 179095 | Male infertility |
| 180380 | Night blindness, congenital stationery, rhodopsin-related |
| 180380 | Retinitis pigmentosa, autosomal recessive |
| 180380 | Retinitis pigmentosa-4, autosomal dominant |
| 181460 | Schistosoma mansoni, susceptibility/resistance to |
| 186860 | Leukemia/lymphoma, T-cell |
| 186960 | Leukemia/lymphoma, T-cell |
| 190000 | Atransferrinemia |
| 192974 | Neonatal alloimmune thrombocytopenia |
| 192974 | Glycoprotein Ia deficiency |
| 193300 | Renal cell carcinoma |
| 193300 | von Hippel-Lindau syndrome |
| 201460 | Acyl-CoA dehydrogenase, long chain, deficiency of |
| 203500 | Alkaptonuria |
| 205100 | Amyotrophic lateral sclerosis, juvenile |
| 213700 | Cerebrotendinous xanthomatosis |
| 222900 | Sucrose intolerance |
| 227646 | Fanconi anemia, type D |
| 232050 | Propionicacidemia, type II or pccB type |
| 245200 | Krabbe disease |
| 253260 | Biotinidase deficiency |
| 262000 | Bjornstad syndrome |
| 276902 | Usher syndrome, type 3 |
| 278720 | Xeroderma pigmentosum, group C |
| 300047 | Mental retardation, X-linked 20 |
| 300062 | Mental retardation, X-linked 14 |
| 300600 | Ocular albinism, Forsius-Eriksson type |
| 309470 | Mental retardation, X-linked, syndromic-3, |
| | with spastic diplegia |
| 309500 | Renpenning syndrome-1 |
| 309610 | Mental retardation, X-linked, syndromic-2, with |
| | dysmorphism and cerebral atrophy |
| 310500 | Night blindness, congenital stationary, type 1 |
| 310600 | Norrie disease |
| 310600 | Exudative vitreoretinopathy, X-linked, 305390 |
| 311050 | Optic atrophy, X-linked |
| 312060 | Properdin deficiency, X-linked |
| 600258 | Colorectal cancer, hereditary nonpolyposis, type 3 |
| 600334 | Tibial muscular dystrophy |
| 600807 | Bronchial asthma |
| 600882 | Charcot-Marie-Tooth neuropathy-2B |
| 601154 | Cardiomyopathy, dilated, 1E |
| 601199 | Neonatal hyperparathyroidism, 239200 |
| 601199 | Hypocalcemia, autosomal dominant, 601198 |
| 601199 | Hypocalciuric hypercalcemia, type I, 145980 |
| 601253 | Muscular dystrophy, limb-girdle, type IC |
| 601277 | Ichthyosis, lamellar, type 2 |
| 601318 | Diabetes mellitus, insulin-dependent, 13 |
| 601471 | Moebius syndrome-2 |
| 601596 | Charcot-Marie-Tooth neuropathy, demyelinating |
| 601682 | Glaucoma 1C, primary open angle |
| 601692 | Reis-Bucklers corneal dystrophy |
| 601692 | Corneal dystrophy, Avellino type |
| 601692 | Corneal dystrophy, Groenouw type I, 121900 |
| 601692 | Corneal dystrophy, lattice type I, 122200 |
| 601841 | Protein C inhibitor deficiency |
| 602011 | Pancreatic endocrine tumors |
| 602089 | Hemangioma, capillary, hereditary |
| 602121 | Deafness, autosomal dominant nonsyndromic |
| | sensorineural, 1, 124900 |
| 602460 | Deafness, autosomal dominant 15, 602459 |

### Polynucleotide and Polypeptide Variants

[0087] The present invention is directed to variants of the polynucleotide sequence disclosed in SEQ ID NO:X or the complementary strand thereto, nucleotide sequences encoding the polypeptide of SEQ ID NO:Y, the nucleotide sequence of SEQ ID NO:X encoding the polypeptide sequence as defined in column 7 of Table 1A, nucleotide sequences encoding the polypeptide as defined in column 7 of Table 1A, the nucleotide sequence as defined in columns 8 and 9 of Table 2, nucleotide sequences encoding the polypeptide encoded by the nucleotide sequence as defined in columns 8 and 9 of Table 2, the nucleotide sequence as defined in column 6 of Table 1B, nucleotide sequences encoding the polypeptide encoded by the nucleotide sequence as defined in column 6 of Table 1B, the cDNA sequence contained in Clone ID NO:Z, and/or nucleotide sequences encoding the polypeptide encoded by the cDNA sequence contained in Clone ID NO:Z.

[0088] The present invention also encompasses variants of the polypeptide sequence disclosed in SEQ ID NO:Y, the polypeptide sequence as defined in column 7 of Table 1A, a polypeptide sequence encoded by the polynucleotide sequence in SEQ ID NO:X, a polypeptide sequence encoded by the nucleotide sequence as defined in columns 8 and 9 of Table 2, a polypeptide sequence encoded by the nucleotide sequence as defined in column 6 of Table 1B, a polypeptide sequence encoded by the complement of the polynucleotide sequence in SEQ ID NO:X, and/or a polypeptide sequence encoded by the cDNA sequence contained in Clone ID NO:Z.

[0089] “Variant” refers to a polynucleotide or polypeptide differing from the polynucleotide or polypeptide of the present invention, but retaining essential properties thereof. Generally, variants are overall closely similar, and, in many regions, identical to the polynucleotide or polypeptide of the present invention.

[0090] Thus, one aspect of the invention provides an isolated nucleic acid molecule comprising, or alternatively consisting of, a polynucleotide having a nucleotide sequence selected from the group consisting of: (a) a nucleotide sequence described in SEQ ID NO:X or contained in the cDNA sequence of Clone ID NO:Z; (b) a nucleotide sequence in SEQ ID NO:X or the cDNA in Clone ID NO:Z which encodes the complete amino acid sequence of SEQ ID NO:Y or the complete amino acid sequence encoded by the cDNA in Clone ID NO:Z; (c) a nucleotide sequence in SEQ ID NO:X or the cDNA in Clone ID NO:Z which encodes a mature polypeptide; (d) a nucleotide sequence in SEQ ID NO:X or the cDNA sequence of Clone ID NO:Z, which encodes a biologically active fragment of a polypeptide; (e) a nucleotide sequence in SEQ ID NO:X or the cDNA sequence of Clone ID NO:Z, which encodes an antigenic fragment of a polypeptide; (f) a nucleotide sequence encoding a polypeptide comprising the complete amino acid sequence of SEQ ID NO:Y or the complete amino acid sequence encoded by the cDNA in Clone ID NO:Z; (g) a nucleotide sequence encoding a mature polypeptide of the amino acid sequence of SEQ ID NO:Y or the amino acid sequence encoded by the cDNA in Clone ID NO:Z; (h) a nucleotide sequence encoding a biologically active fragment of a polypeptide having the complete amino acid sequence of SEQ ID NO:Y or the complete amino acid sequence encoded by the cDNA in Clone ID NO:Z; (i) a nucleotide sequence encoding an antigenic fragment of a polypeptide having the complete amino acid sequence of SEQ ID NO:Y or the complete amino acid sequence encoded by the cDNA in Clone ID NO:Z; and (j) a nucleotide sequence complementary to any of the nucleotide sequences in (a), (b), (c), (d), (e), (f), (g), (h), or (i) above.

[0091] The present invention is also directed to nucleic acid molecules which comprise, or alternatively consist of, a nucleotide sequence which is at least 80%, 85%, 90%, 95%, 96%, 97%, 98%, 99% or 100%, identical to, for example, any of the nucleotide sequences in (a), (b), (c), (d), (e), (f), (g), (h), (i), or (j) above, the nucleotide coding sequence in SEQ ID NO:X or the complementary strand thereto, the nucleotide coding sequence of the cDNA contained in Clone ID NO:Z or the complementary strand thereto, a nucleotide sequence encoding the polypeptide of SEQ ID NO:Y, a nucleotide sequence encoding a polypeptide sequence encoded by the nucleotide sequence in SEQ ID NO:X, a polypeptide sequence encoded by the complement of the polynucleotide sequence in SEQ ID NO:X, a nucleotide sequence encoding the polypeptide encoded by the cDNA contained in Clone ID NO:Z, the nucleotide coding sequence in SEQ ID NO:X as defined in columns 8 and 9 of Table 2 or the complementary strand thereto, a nucleotide sequence encoding the polypeptide encoded by the nucleotide sequence in SEQ ID NO:X as defined in columns 8 and 9 of Table 2 or the complementary strand thereto, the nucleotide coding sequence in SEQ ID NO:B as defined in column 6 of Table 1B or the complementary strand thereto, a nucleotide sequence encoding the polypeptide encoded by the nucleotide sequence in SEQ ID NO:B as defined in column 6 of Table 1B or the complementary strand thereto, the nucleotide sequence in SEQ ID NO:X encoding the polypeptide sequence as defined in column 7 of Table 1A or the complementary strand thereto, nucleotide sequences encoding the polypeptide as defined in column 7 of Table 1A or the complementary strand thereto, and/or polynucleotide fragments of any of these nucleic acid molecules (e.g., those fragments described herein). Polynucleotides which hybridize to the complement of these nucleic acid molecules under stringent hybridization conditions or alternatively, under lower stringency conditions, are also encompassed by the invention, as are polypeptides encoded by these polynucleotides and nucleic acids.

[0092] In a preferred embodiment, the invention encompasses nucleic acid molecules which comprise, or alternatively, consist of a polynucleotide which hybridizes under stringent hybridization conditions, or alternatively, under lower stringency conditions, to a polynucleotide in (a), (b), (c), (d), (e), (f), (g), (h), or (i), above, as are polypeptides encoded by these polynucleotides. In another preferred embodiment, polynucleotides which hybridize to the complement of these nucleic acid molecules under stringent hybridization conditions, or alternatively, under lower stringency conditions, are also encompassed by the invention, as are polypeptides encoded by these polynucleotides.

[0093] In another embodiment, the invention provides a purified protein comprising, or alternatively consisting of, a polypeptide having an amino acid sequence selected from the group consisting of: (a) the complete amino acid sequence of SEQ ID NO:Y or the complete amino acid sequence encoded by the cDNA in Clone ID NO:Z; (b) the amino acid sequence of a mature form of a polypeptide having the amino acid sequence of SEQ ID NO:Y or the amino acid sequence encoded by the cDNA in Clone ID NO:Z; (c) the amino acid sequence of a biologically active fragment of a polypeptide having the complete amino acid sequence of SEQ ID NO:Y or the complete amino acid sequence encoded by the cDNA in Clone ID NO:Z; and (d) the amino acid sequence of an antigenic fragment of a polypeptide having the complete amino acid sequence of SEQ ID NO:Y or the complete amino acid sequence encoded by the cDNA in Clone ID NO:Z.

[0094] The present invention is also directed to proteins which comprise, or alternatively consist of, an amino acid sequence which is at least 80%, 85%, 90%, 95%, 96%, 97%, 98%, 99% or 100%, identical to, for example, any of the amino acid sequences in (a), (b), (c), or (d), above, the amino acid sequence shown in SEQ ID NO:Y, the amino acid sequence encoded by the cDNA contained in Clone ID NO:Z, the amino acid sequence of the polypeptide encoded by the nucleotide sequence in SEQ ID NO:X as defined in columns 8 and 9 of Table 2, the amino acid sequence of the polypeptide encoded by the nucleotide sequence in SEQ ID NO:B as defined in column 6 of Table 1B, the amino acid sequence as defined in column 7 of Table 1A, an amino acid sequence encoded by the nucleotide sequence in SEQ ID NO:X, and an amino acid sequence encoded by the complement of the polynucleotide sequence in SEQ ID NO:X. Fragments of these polypeptides are also provided (e.g., those fragments described herein). Further proteins encoded by polynucleotides which hybridize to the complement of the nucleic acid molecules encoding these amino acid sequences under stringent hybridization conditions or alternatively, under lower stringency conditions, are also encompassed by the invention, as are the polynucleotides encoding these proteins.

[0095] By a nucleic acid having a nucleotide sequence at least, for example, 95% “identical” to a reference nucleotide sequence of the present invention, it is intended that the nucleotide sequence of the nucleic acid is identical to the reference sequence except that the nucleotide sequence may include up to five point mutations per each 100 nucleotides of the reference nucleotide sequence encoding the polypeptide. In other words, to obtain a nucleic acid having a nucleotide sequence at least 95% identical to a reference nucleotide sequence, up to 5% of the nucleotides in the reference sequence may be deleted or substituted with another nucleotide, or a number of nucleotides up to 5% of the total nucleotides in the reference sequence may be inserted into the reference sequence. The query sequence may be an entire sequence referred to in Table 1A or 2 as the ORF (open reading frame), or any fragment specified as described herein.

[0096] As a practical matter, whether any particular nucleic acid molecule or polypeptide is at least 80%, 85%, 90%, 95%, 96%, 97%, 98% or 99% identical to a nucleotide sequence of the present invention can be determined conventionally using known computer programs. A preferred method for determining the best overall match between a query sequence (a sequence of the present invention) and a subject sequence, also referred to as a global sequence alignment, can be determined using the FASTDB computer program based on the algorithm of Brutlag et al. (Comp. App. Biosci. 6:237-245 (1990)). In a sequence alignment the query and subject sequences are both DNA sequences. An RNA sequence can be compared by converting U's to T's. The result of said global sequence alignment is expressed as percent identity. Preferred parameters used in a FASTDB alignment of DNA sequences to calculate percent identity are: Matrix=Unitary, k-tuple=4, Mismatch Penalty=1, Joining Penalty=30, Randomization Group Length=0, Cutoff Score=1, Gap Penalty=5, Gap Size Penalty 0.05, Window Size=500 or the length of the subject nucleotide sequence, whichever is shorter.

[0097] If the subject sequence is shorter than the query sequence because of 5′ or 3′ deletions, not because of internal deletions, a manual correction must be made to the results. This is because the FASTDB program does not account for 5′ and 3′ truncations of the subject sequence when calculating percent identity. For subject sequences truncated at the 5′ or 3′ ends, relative to the query sequence, the percent identity is corrected by calculating the number of bases of the query sequence that are 5′ and 3′ of the subject sequence, which are not matched/aligned, as a percent of the total bases of the query sequence. Whether a nucleotide is matched/aligned is determined by results of the FASTDB sequence alignment. This percentage is then subtracted from the percent identity, calculated by the above FASTDB program using the specified parameters, to arrive at a final percent identity score. This corrected score is what is used for the purposes of the present invention. Only bases outside the 5′ and 3′ bases of the subject sequence, as displayed by the FASTDB alignment, which are not matched/aligned with the query sequence, are calculated for the purposes of manually adjusting the percent identity score.

[0098] For example. a 90 base subject sequence is aligned to a 100 base query sequence to determine percent identity. The deletions occur at the 5′ end of the subject sequence and therefore, the FASTDB alignment does not show a matched/alignment of the first 10 bases at 5′ end. The 10 unpaired bases represent 10% of the sequence (number of bases at the 5′ and 3′ ends not matched/total number of bases in the query sequence) so 10% is subtracted from the percent identity score calculated by the FASTDB program. If the remaining 90 bases were perfectly matched the final percent identity would be 90%. In another example, a 90 base subject sequence is compared with a 100 base query sequence. This time the deletions are internal deletions so that there are no bases on the 5′ or 3′ of the subject sequence which are not matched/aligned with the query. In this case the percent identity calculated by FASTDB is not manually corrected. Once again, only bases 5′ and 3′ of the subject sequence which are not matched/aligned with the query sequence are manually corrected for. No other manual corrections are to be made for the purposes of the present invention.

[0099] By a polypeptide having an amino acid sequence at least, for example, 95% “identical” to a query amino acid sequence of the present invention, it is intended that the amino acid sequence of the subject polypeptide is identical to the query sequence except that the subject polypeptide sequence may include up to five amino acid alterations per each 100 amino acids of the query amino acid sequence. In other words, to obtain a polypeptide having an amino acid sequence at least 95% identical to a query amino acid sequence, up to 5% of the amino acid residues in the subject sequence may be inserted, deleted, (indels) or substituted with another amino acid. These alterations of the reference sequence may occur at the amino or carboxy terminal positions of the reference amino acid sequence or anywhere between those terminal positions, interspersed either individually among residues in the reference sequence or in one or more contiguous groups within the reference sequence.

[0100] As a practical matter, whether any particular polypeptide is at least 80%, 85%, 90%, 95%, 96%, 97%, 98% or 99% identical to, for instance, the amino acid sequence of a polypeptide referred to in Table 1A (e.g., the amino acid sequence identified in column 6) or Table 2 (e.g., the amino acid sequence of the polypeptide encoded by the polynucleotide sequence defined in columns 8 and 9 of Table 2) or a fragment thereof, the amino acid sequence of the polypeptide encoded by the polynucleotide sequence in SEQ ID NO:B as defined in column 6 of Table 1B or a fragment thereof, the amino acid sequence of the polypeptide encoded by the nucleotide sequence in SEQ ID NO:X or a fragment thereof, or the amino acid sequence of the polypeptide encoded by cDNA contained in Clone ID NO:Z, or a fragment thereof, can be determined conventionally using known computer programs. A preferred method for determining the best overall match between a query sequence (a sequence of the present invention) and a subject sequence, also referred to as a global sequence alignment can be determined using the FASTDB computer program based on the algorithm of Brutlag et al. (Comp. App. Biosci.6:237-245 (1990)). In a sequence alignment the query and subject sequences are either both nucleotide sequences or both amino acid sequences. The result of said global sequence alignment is expressed as percent identity. Preferred parameters used in a FASTDB amino acid alignment are: Matrix=PAM 0, k-tuple=2, Mismatch Penalty=1, Joining Penalty=20, Randomization Group Length=0, Cutoff Score=1, Window Size=sequence length, Gap Penalty=5, Gap Size Penalty=0.05, Window Size=500 or the length of the subject amino acid sequence, whichever is shorter.

[0101] If the subject sequence is shorter than the query sequence due to N- or C-terminal deletions, not because of internal deletions, a manual correction must be made to the results. This is because the FASTDB program does not account for N- and C-terminal truncations of the subject sequence when calculating global percent identity. For subject sequences truncated at the N- and C-termini, relative to the query sequence, the percent identity is corrected by calculating the number of residues of the query sequence that are N- and C-terminal of the subject sequence, which are not matched/aligned with a corresponding subject residue, as a percent of the total bases of the query sequence. Whether a residue is matched/aligned is determined by results of the FASTDB sequence alignment. This percentage is then subtracted from the percent identity, calculated by the above FASTDB program using the specified parameters, to arrive at a final percent identity score. This final percent identity score is what is used for the purposes of the present invention. Only residues to the N- and C-termini of the subject sequence, which are not matched/aligned with the query sequence, are considered for the purposes of manually adjusting the percent identity score. That is, only query residue positions outside the farthest N- and C- terminal residues of the subject sequence.

[0102] For example, a 90 amino acid residue subject sequence is aligned with a 100 residue query sequence to determine percent identity. The deletion occurs at the N-terminus of the subject sequence and therefore, the FASTDB alignment does not show a matching/alignment of the first 10 residues at the N-terminus. The 10 unpaired residues represent 10% of the sequence (number of residues at the N- and C- termini not matched/total number of residues in the query sequence) so 10% is subtracted from the percent identity score calculated by the FASTDB program. If the remaining 90 residues were perfectly matched the final percent identity would be 90%. In another example, a 90 residue subject sequence is compared with a 100 residue query sequence. This time the deletions are internal deletions so there are no residues at the N- or C-termini of the subject sequence which are not matched/aligned with the query. In this case the percent identity calculated by FASTDB is not manually corrected. Once again, only residue positions outside the N- and C-terminal ends of the subject sequence, as displayed in the FASTDB alignment, which are not matched/aligned with the query sequnce are manually corrected for. No other manual corrections are to made for the purposes of the present invention.

[0103] The polynucleotide variants of the invention may contain alterations in the coding regions, non-coding regions, or both. Especially preferred are polynucleotide variants containing alterations which produce silent substitutions, additions, or deletions, but do not alter the properties or activities of the encoded polypeptide. Nucleotide variants produced by silent substitutions due to the degeneracy of the genetic code are preferred. Moreover, polypeptide variants in which less than 50, less than 40, less than 30, less than 20, less than 10, or 5-50, 5-25, 5-10, 1-5, or 1-2 amino acids are substituted, deleted, or added in any combination are also preferred. Polynucleotide variants can be produced for a variety of reasons, e.g., to optimize codon expression for a particular host (change codons in the human mRNA to those preferred by a bacterial host such as E. coli).

[0104] Naturally occurring variants are called “allelic variants,” and refer to one of several alternate forms of a gene occupying a given locus on a chromosome of an organism. (Genes II, Lewin, B., ed., John Wiley & Sons, New York (1985)). These allelic variants can vary at either the polynucleotide and/or polypeptide level and are included in the present invention. Alternatively, non-naturally occurring variants may be produced by mutagenesis techniques or by direct synthesis.

[0105] Using known methods of protein engineering and recombinant DNA technology, variants may be generated to improve or alter the characteristics of the polypeptides of the present invention. For instance, one or more amino acids can be deleted from the N-terminus or C-terminus of the polypeptide of the present invention without substantial loss of biological function. As an example, Ron et al. (J. Biol. Chem. 268: 2984-2988 (1993)) reported variant KGF proteins having heparin binding activity even after deleting 3, 8, or 27 amino-terminal amino acid residues. Similarly, Interferon gamma exhibited up to ten times higher activity after deleting 8-10 amino acid residues from the carboxy terminus of this protein. (Dobeli et al., J. Biotechnology 7:199-216 (1988).)

[0106] Moreover, ample evidence demonstrates that variants often retain a biological activity similar to that of the naturally occurring protein. For example, Gayle and coworkers (J. Biol. Chem. 268:22105-22111 (1993)) conducted extensive mutational analysis of human cytokine IL-1a. They used random mutagenesis to generate over 3,500 individual IL-1a mutants that averaged 2.5 amino acid changes per variant over the entire length of the molecule. Multiple mutations were examined at every possible amino acid position. The investigators found that “[m]ost of the molecule could be altered with little effect on either [binding or biological activity].” In fact, only 23 unique amino acid sequences, out of more than 3,500 nucleotide sequences examined, produced a protein that significantly differed in activity from wild-type.

[0107] Furthermore, even if deleting one or more amino acids from the N-terminus or C-terminus of a polypeptide results in modification or loss of one or more biological functions, other biological activities may still be retained. For example, the ability of a deletion variant to induce and/or to bind antibodies which recognize the secreted form will likely be retained when less than the majority of the residues of the secreted form are removed from the N-terminus or C-terminus. Whether a particular polypeptide lacking N- or C-terminal residues of a protein retains such immunogenic activities can readily be determined by routine methods described herein and otherwise known in the art.

[0108] Thus, the invention further includes polypeptide variants which show a functional activity (e.g., biological activity) of the polyp eptides of the invention. Such variants include deletions, insertions, inversions, repeats, and substitutions selected according to general rules known in the art so as have little effect on activity.

[0109] The present application is directed to nucleic acid molecules at least 80%, 85%, 90%, 95%, 96%, 97%, 98%, 99% or 100% identical to the nucleic acid sequences disclosed herein, (e.g., encoding, a polypeptide having the amino acid sequence of an N and/or C terminal deletion), irrespective of whether they encode a polypeptide having functional activity. This is because even where a particular nucleic acid molecule does not encode a polypeptide having functional activity, one of skill in the art would still know how to use the nucleic acid molecule, for instance, as a hybridization probe or a polymerase chain reaction (PCR) primer. Uses of the nucleic acid molecules of the present invention that do not encode a polypeptide having functional activity include, inter alia, (1) isolating a gene or allelic or splice variants thereof in a cDNA library; (2) in situ hybridization (e.g., “FISH”) to metaphase chromosomal spreads to provide precise chromosomal location of the gene, as described in Verma et al., Human Chromosomes: A Manual of Basic Techniques, Pergamon Press, New York (1988); (3) Northern Blot analysis for detecting mRNA expression in specific tissues (e.g., normal or diseased tissues); and (4) in situ hybridization (e.g., histochemistry) for detecting mRNA expression in specific tissues (e.g., normal or diseased tissues).

[0110] Preferred, however, are nucleic acid molecules having sequences at least 80%, 85%, 90%, 95%, 96%, 97%, 98%, 99% or 100% identical to the nucleic acid sequences disclosed herein, which do, in fact, encode a polypeptide having functional activity. By a polypeptide having “functional activity” is meant, a polypeptide capable of displaying one or more known functional activities associated with a full-length (complete) protein of the invention. Such functional activities include, but are not limited to, biological activity, antigenicity [ability to bind (or compete with a polypeptide of the invention for binding) to an anti-polypeptide of the invention antibody], immunogenicity (ability to generate antibody which binds to a specific polypeptide of the invention), ability to form multimers with polypeptides of the invention, and ability to bind to a receptor or ligand for a polypeptide of the invention.

[0111] The functional activity of the polypeptides, and fragments, variants and derivatives of the invention, can be assayed by various methods.

[0112] For example, in one embodiment where one is assaying for the ability to bind or compete with a full-length polypeptide of the present invention for binding to an anti-polypetide antibody, various immunoassays known in the art can be used, including but not limited to, competitive and non-competitive assay systems using techniques such as radioimmunoassays, ELISA (enzyme linked immunosorbent assay), “sandwich” immunoassays, immunoradiometric assays, gel diffusion precipitation reactions, immunodiffusion assays, in situ immunoassays (using colloidal gold, enzyme or radioisotope labels, for example), western blots, precipitation reactions, agglutination assays (e.g., gel agglutination assays, hemagglutination assays), complement fixation assays, immunofluorescence assays, protein A assays, and immunoelectrophoresis assays, etc. In one embodiment, antibody binding is detected by detecting a label on the primary antibody. In another embodiment, the primary antibody is detected by detecting binding of a secondary antibody or reagent to the primary antibody. In a further embodiment, the secondary antibody is labeled. Many means are known in the art for detecting binding in an immunoassay and are within the scope of the present invention.

[0113] In another embodiment, where a ligand is identified, or the ability of a polypeptide fragment, variant or derivative of the invention to multimerize is being evaluated, binding can be assayed, e.g., by means well-known in the art, such as, for example, reducing and non-reducing gel chromatography, protein affinity chromatography, and affinity blotting. See generally, Phizicky et al.. Microbiol. Rev. 59:94-123 (1995). In another embodiment, the ability of physiological correlates of a polypeptide of the present invention to bind to a substrate(s) of the polypeptide of the invention can be routinely assayed using techniques known in the art.

[0114] In addition, assays described herein (see Examples) and otherwise known in the art may routinely be applied to measure the ability of polypeptides of the present invention and fragments, variants and derivatives thereof to elicit polypeptide related biological activity (either in vitro or in vivo). Other methods will be known to the skilled artisan and are within the scope of the invention.

[0115] Of course, due to the degeneracy of the genetic code, one of ordinary skill in the art will immediately recognize that a large number of the nucleic acid molecules having a sequence at least 80%, 85%, 90%, 95%, 96%, 97%, 98%, 99%, or 100% identical to, for example, the nucleic acid sequence of the cDNA contained in Clone ID NO:Z, the nucleic acid sequence referred to in Table 1A (SEQ ID NO:X), the nucleic acid sequence disclosed in Table 2 (e.g,. the nucleic acid sequence delineated in columns 8 and 9) or fragments thereof, will encode polypeptides “having functional activity.” In fact, since degenerate variants of any of these nucleotide sequences all encode the same polypeptide, in many instances, this will be clear to the skilled artisan even without performing the above described comparison assay. It will be further recognized in the art that, for such nucleic acid molecules that are not degenerate variants, a reasonable number will also encode a polypeptide having functional activity. This is because the skilled artisan is fully aware of amino acid substitutions that are either less likely or not likely to significantly effect protein function (e.g., replacing one aliphatic amino acid with a second aliphatic amino acid), as further described below.

[0116] For example, guidance concerning how to make phenotypically silent amino acid substitutions is provided in Bowie et al., “Deciphering the Message in Protein Sequences: Tolerance to Amino Acid Substitutions,” Science 247:1306-1310 (1990), wherein the authors indicate that there are two main strategies for studying the tolerance of an amino acid sequence to change.

[0117] The first strategy exploits the tolerance of amino acid substitutions by natural selection during the process of evolution. By comparing amino acid sequences in different species, conserved amino acids can be identified. These conserved amino acids are likely important for protein function. In contrast, the amino acid positions where substitutions have been tolerated by natural selection indicates that these positions are not critical for protein function. Thus, positions tolerating amino acid substitution could be modified while still maintaining biological activity of the protein.

[0118] The second strategy uses genetic engineering to introduce amino acid changes at specific positions of a cloned gene to identify regions critical for protein function. For example, site directed mutagenesis or alanine-scanning mutagenesis (introduction of single alanine mutations at every residue in the molecule) can be used. See Cunningham and Wells, Science 244:1081-1085 (1989). The resulting mutant molecules can then be tested for biological activity.

[0119] As the authors state, these two strategies have revealed that proteins are surprisingly tolerant of amino acid substitutions. The authors further indicate which amino acid changes are likely to be permissive at certain amino acid positions in the protein. For example, most buried (within the tertiary structure of the protein) amino acid residues require nonpolar side chains, whereas few features of surface side chains are generally conserved. Moreover, tolerated conservative amino acid substitutions involve replacement of the aliphatic or hydrophobic amino acids Ala, Val, Leu and Ile; replacement of the hydroxyl residues Ser and Thr; replacement of the acidic residues Asp and Glu; replacement of the amide residues Asn and Gln, replacement of the basic residues Lys, Arg, and His; replacement of the aromatic residues Phe, Tyr, and Trp, and replacement of the small-sized amino acids Ala, Ser, Thr, Met, and Gly. Besides conservative amino acid substitution, variants of the present invention include (i) substitutions with one or more of the non-conserved amino acid residues, where the substituted amino acid residues may or may not be one encoded by the genetic code, or (ii) substitutions with one or more of the amino acid residues having a substituent group, or (iii) fusion of the mature polypeptide with another compound, such as a compound to increase the stability and/or solubility of the polypeptide (for example, polyethylene glycol), (iv) fusion of the polypeptide with additional amino acids, such as, for example, an IgG Fc fusion region peptide, serum albumin (preferably human serum albumin) or a fragment thereof, or leader or secretory sequence, or a sequence facilitating purification, or (v) fusion of the polypeptide with another compound, such as albumin (including but not limited to recombinant albumin (see, e.g., U.S. Pat. No. 5,876,969, issued Mar. 2, 1999, EP Patent 0 413 622, and U.S. Pat. No. 5,766,883, issued Jun. 16, 1998, herein incorporated by reference in their entirety)). Such variant polypeptides are deemed to be within the scope of those skilled in the art from the teachings herein.

[0120] For example, polypeptide variants containing amino acid substitutions of charged amino acids with other charged or neutral amino acids may produce proteins with improved characteristics, such as less aggregation. Aggregation of pharmaceutical formulations both reduces activity and increases clearance due to the aggregate's immunogenic activity. See Pinckard et al., Clin. Exp. Immunol. 2:331-340 (1967); Robbins et al., Diabetes 36: 838-845 (1987); Cleland et al., Crit. Rev. Therapeutic Drug Carrier Systems 10:307-377 (1993).

[0121] A further embodiment of the invention relates to polypeptides which comprise the amino acid sequence of a polypeptide having an amino acid sequence which contains at least one amino acid substitution, but not more than 50 amino acid substitutions, even more preferably, not more than 40 amino acid substitutions, still more preferably, not more than 30 amino acid substitutions, and still even more preferably, not more than 20 amino acid substitutions from a polypeptide sequence disclosed herein. Of course it is highly preferable for a polypeptide to have an amino acid sequence which comprises the amino acid sequence of a polypeptide of SEQ ID NO:Y, an amino acid sequence encoded by SEQ ID NO:X, an amino acid sequence encoded by the portion of SEQ ID NO:X as defined in columnns 8 and 9 of Table 2, an amino acid sequence encoded by the complement of SEQ ID NO:X, and/or an amino acid sequence encoded by cDNA contained in Clone ID NO:Z which contains, in order of ever-increasing preference, at least one, but not more than 10, 9, 8, 7, 6, 5, 4, 3, 2 or 1 amino acid substitutions.

[0122] In specific embodiments, the polypeptides of the invention comprise, or alternatively, consist of, fragments or variants of a reference amino acid sequence selected from: (a) the amino acid sequence of SEQ ID NO:Y or fragments thereof (e.g., the mature form and/or other fragments described herein); (b) the amino acid sequence encoded by SEQ ID NO:X or fragments thereof; (c) the amino acid sequence encoded by the complement of SEQ ID NO:X or fragments thereof; (d) the amino acid sequence encoded by the portion of SEQ ID NO:X as defined in columns 8 and 9 of Table 2 or fragments thereof; and (e) the amino acid sequence encoded by cDNA contained in Clone ID NO:Z or fragments thereof; wherein the fragments or variants have 1-5, 5-10, 5-25, 5-50, 10-50 or 50-150, amino acid residue additions, substitutions, andlor deletions when compared to the reference amino acid sequence. In preferred embodiments, the amino acid substitutions are conservative. Polynucleotides encoding these polypeptides are also encompassed by the invention.

### Polynucleotide and Polypeptide Fragments

[0123] The present invention is also directed to polynucleotide fragments of the polynucleotides (nucleic acids) of the invention. In the present invention, a “polynucleotide fragment” refers to a polynucleotide having a nucleic acid sequence which, for example: is a portion of the cDNA contained in Clone ID NO:Z or the complementary strand thereto; is a portion of the polynucleotide sequence encoding the polypeptide encoded by the cDNA contained in Clone ID NO:Z or the complementary strand thereto; is a portion of a polynucleotide sequence encoding the amino acid sequence encoded by the region of SEQ ID NO:X as defined in columns 8 and 9 of Table 2 or the complementary strand thereto; is a portion of the polynucleotide sequence of SEQ ID NO:X as defined in columns 8 and 9 of Table 2 or the complementary strand thereto; is a portion of the polynucleotide sequence in SEQ ID NO:X or the complementary strand thereto; is a polynucleotide sequence encoding a portion of the polypeptide of SEQ ID NO:Y; is a polynucleotide sequence encoding a portion of a polypeptide encoded by SEQ ID NO:X; is a polynucleotide sequence encoding a portion of a polypeptide encoded by the complement of the polynucleotide sequence in SEQ ID NO:X; is a portion of a polynucleotide sequence encoding the amino acid sequence encoded by the region of SEQ ID NO:B as defined in column 6 of Table 1B or the complementary strand thereto; or is a portion of the polynucleotide sequence of SEQ ID NO:B as defined in column 6 of Table 1B or the complementary strand thereto.

[0124] The polynucleotide fragments of the invention are preferably at least about 15 nt, and more preferably at least about 20 nt, still more preferably at least about 30 nt, and even more preferably, at least about 40 nt, at least about 50 nt, at least about 75 nt, or at least about 150 nt in length. A fragment “at least 20 nt in length,” for example, is intended to include 20 or more contiguous bases from the cDNA sequence contained in Clone ID NO:Z, or the nucleotide sequence shown in SEQ ID NO:X or the complementary stand thereto. In this context “about” includes the particularly recited value or a value larger or smaller by several (5, 4, 3, 2, or 1) nucleotides, at either terminus or at both termini. These nucleotide fragments have uses that include, but are not limited to, as diagnostic probes and primers as discussed herein. Of course, larger fragments (e.g., at least 160, 170, 180, 190, 200, 250, 500, 600, 1000, or 2000 nucleotides in length ) are also encompassed by the invention.

[0125] Moreover, representative examples of polynucleotide fragments of the invention comprise, or alternatively consist of, a sequence from about nucleotide number 1-50, 51-100, 101-150, 151-200, 201-250, 251-300, 301-350, 351-400, 401-450, 451-500, 501-550, 551-600, 601-650, 651-700, 701-750, 751-800, 801-850, 851-900, 901-950, 951-1000, 1001-1050, 1051-1100, 1101-1150, 1151-1200, 1201-1250, 1251-1300, 1301-1350, 1351-1400, 1401-1450, 1451-1500, 1501-1550, 1551-1600, 1601-1650, 1651-1700, 1701-1750, 1751-1800, 1801-1850, 1851-1900, 1901-1950, 1951-2000, 2001-2050, 2051-2100, 2101-2150, 2151-2200, 2201-2250, 2251-2300, 2301-2350, 2351-2400, 2401-2450, 2451-2500, 2501-2550, 2551-2600, 2601-2650, 2651-2700, 2701-2750, 2751-2800, 2801-2850, 2851-2900, 2901-2950, 2951-3000, 3001-3050, 3051-3100, 3101-3150, 3151-3200, 3201-3250, 3251-3300, 3301-3350, 3351-3400, 3401-3450, 3451-3500, 3501-3550, 3551-3600, 3601-3650, 3651-3700, 3701-3750, 3751-3800, 3801-3850, 3851-3900, 3901-3950, 3951-4000, 4001-4050, 4051-4100, 4101-4150, 4151-4200, 4201-4250, 4251-4300, 4301-4350, 4351-4400, 4401-4450, 4451-4500, 4501-4550, 4551-4600, 4601-4650, 4651-4700, 4701-4750, 4751-4800, 4801-4850, 4851-4900, 4901-4950, 4951-5000, 5001-5050, 5051-5100, 5101-5150, 5151-5200, 5201-5250, 5251-5300, 5301-5350, 5351-5400, 5401-5450, 5451-5500, 5501-5550, 5551-5600, 5601-5650, 5651-5700, 5701-5750, 5751-5800, 5801-5850, 5851-5900, 5901-5950, 5951-6000, 6001-6050, 6051-6100, 6101-6150, 6151-6200, 6201-6250, 6251-6300, 6301-6350, 6351-6400, 6401-6450, 6451-6500, 6501-6550, 6551-6600, 6601-6650, 6651-6700, 6701-6750, 6751-6800, 6801-6850, 6851-6900, 6901-6950, 6951-7000, 7001-7050, 7051-7100, 7101-7150, 7151-7200, 7201-7250, 7251-7300 or 7301 to the end of SEQ ID NO:X, or the complementary strand thereto. In this context “about” includes the particularly recited range or a range larger or smaller by several (5, 4, 3, 2, or 1) nucleotides, at either terminus or at both termini. Preferably, these fragments encode a polypeptide which has a functional activity (e.g., biological activity). More preferably, these polynucleotides can be used as probes or primers as discussed herein. Polynucleotides which hybridize to one or more of these polynucleotides under stringent hybridization conditions or alternatively, under lower stringency conditions are also encompassed by the invention, as are polypeptides encoded by these polynucleotides.

[0126] Further representative examples of polynucleotide fragments of the invention comprise, or alternatively consist of, a sequence from about nucleotide number 1-50, 51-100, 101-150, 151-200, 201-250, 251-300, 301-350, 351-400, 401-450, 451-500, 501-550, 551-600, 601-650, 651-700, 701-750, 751-800, 801-850, 851-900, 901-950, 951-1000, 1001-1050, 1051-1100, 1101-1150, 1151-1200, 1201-1250, 1251-1300, 1301-1350, 1351-1400, 1401-1450, 1451-1500, 1501-1550, 1551-1600, 1601-1650, 1651-1700, 1701-1750, 1751-1800, 1801-1850, 1851-1900, 1901-1950, 1951-2000, 2001-2050, 2051-2100, 2101-2150, 2151-2200, 2201-2250, 2251-2300, 2301-2350, 2351-2400, 2401-2450, 2451-2500, 2501-2550, 2551-2600, 2601-2650, 2651-2700, 2701-2750, 2751-2800, 2801-2850, 2851-2900, 2901-2950, 2951-3000, 3001-3050, 3051-3100, 3101-3150, 3151-3200, 3201-3250, 3251-3300, 3301-3350, 3351-3400, 3401-3450, 3451-3500, 3501-3550, 3551-3600, 3601-3650, 3651-3700, 3701-3750, 3751-3800, 3801-3850, 3851-3900, 3901-3950, 3951-4000, 4001-4050, 4051-4100, 4101-4150, 4151-4200, 4201-4250, 4251-4300, 4301-4350, 4351-4400, 4401-4450, 4451-4500, 4501-4550, 4551-4600, 4601-4650, 4651-4700, 4701-4750, 4751-4800, 4801-4850, 4851-4900, 4901-4950, 4951-5000, 5001-5050, 5051-5100, 5101-5150, 5151-5200, 5201-5250, 5251-5300, 5301-5350, 5351-5400, 5401-5450, 5451-5500, 5501-5550, 5551-5600, 5601-5650, 5651-5700, 5701-5750, 5751-5800, 5801-5850, 5851-5900, 5901-5950, 5951-6000, 6001-6050, 6051-6100, 6101-6150, 6151-6200, 6201-6250, 6251-6300, 6301-6350, 6351-6400, 6401-6450, 6451-6500, 6501-6550, 6551-6600, 6601-6650, 6651-6700, 6701-6750, 6751-6800, 6801-6850, 6851-6900, 6901-6950, 6951-7000, 7001-7050, 7051-7100, 7101-7150, 7151-7200, 7201-7250, 7251-7300 or 7301 to the end of the cDNA sequence contained in Clone ID NO:Z, or the complementary strand thereto. In this context “about” includes the particularly recited range or a range larger or smaller by several (5, 4, 3, 2, or 1) nucleotides, at either terminus or at both termini. Preferably, these fragments encode a polypeptide which has a functional activity (e.g., biological activity). More preferably, these polynucleotides can be used as probes or primers as discussed herein. Polynucleotides which hybridize to one or more of these polynucleotides under stringent hybridization conditions or alternatively, under lower stringency conditions are also encompassed by the invention, as are polypeptides encoded by these polynucleotides.

[0127] Moreover, representative examples of polynucleotide fragments of the invention comprise, or alternatively consist of, a nucleic acid sequence comprising one, two, three, four, five, six, seven, eight, nine, ten, or more of the above described polynucleotide fragments of the invention in combination with a polynucleotide sequence delineated in Table 1B column 6. Additional, representative examples of polynucleotide fragments of the invention comprise, or alternatively consist of, a nucleic acid sequence comprising one, two, three, four, five, six, seven, eight, nine, ten, or more of the above described polynucleotide fragments of the invention in combination with a polynucleotide sequence that is the complementary strand of a sequence delineated in column 6 of Table 1B. In further embodiments, the above-described polynucleotide fragments of the invention comprise, or alternatively consist of, sequences delineated in Table 1B, column 6, and have a nucleic acid sequence which is different from that of the BAC fragment having the sequence disclosed in SEQ ID NO:B (see Table 1B, column 5). In additional embodiments, the above-described polynucleotide fragments of the invention comprise, or alternatively consist of, sequences delineated in Table 1B, column 6, and have a nucleic acid sequence which is different from that published for the BAC clone identified as BAC ID NO:A (see Table 1B, column 4). In additional embodiments, the above-described polynucleotides of the invention comprise, or alternatively consist of, sequences delineated Table 1B, column 6, and have a nucleic acid sequence which is different from that contained in the BAC clone identified as BAC ID NO:A (see Table 1B, column 4). Polypeptides encoded by these polynucleotides, other polynucleotides that encode these polypeptides, and antibodies that bind these polypeptides are also encompassed by the invention. Additionally, fragments and variants of the above-described polynucleotides and polypeptides are also encompassed by the invention.

[0128] In additional specific embodiments, polynucleotides of the invention comprise, or alternatively consist of, one, two, three, four, five, six, seven, eight, nine, ten, or more fragments of the sequences delineated in column 6 of Table 1B, and the polynucleotide sequence of SEQ ID NO:X (e.g., as defined in Table 1B, column 2) or fragments or variants thereof. Polypeptides encoded by these polynucleotides, other polynucleotides that encode these polypeptides, and antibodies that bind these polypeptides are also encompassed by the invention.

[0129] In additional specific embodiments, polynucleotides of the invention comprise, or alternatively consist of, one, two, three, four, five, six, seven, eight, nine, ten, or more fragments of the sequences delineated in column 6 of Table 1B which correspond to the same Clone ID NO:Z (see Table 1B, column 1), and the polynucleotide sequence of SEQ ID NO:X (e.g., as defined in Table 1A or 1B) or fragments or variants thereof. Polypeptides encoded by these polynucleotides, other polynucleotides that encode these polypeptides, and antibodies that bind these polypeptides are also encompassed by the invention.

[0130] In further specific embodiments, polynucleotides of the invention comprise, or alternatively consist of, one, two, three, four, five, six, seven, eight, nine, ten, or more fragments of the sequences delineated in the same row of column 6 of Table 1B, and the polynucleotide sequence of SEQ ID NO:X (e.g., as defined in Table 1A or 1B) or fragments or variants thereof. Polypeptides encoded by these polynucleotides, other polynucleotides that encode these polypeptides, and antibodies that bind these polypeptides are also encompassed by the invention.

[0131] In additional specific embodiments, polynucleotides of the invention comprise, or alternatively consist of a polynucleotide sequence in which the 3 ′ 10 polynucleotides of one of the sequences delineated in column 6 of Table 1B and the 5 ′ 10 polynucleotides of the sequence of SEQ ID NO:X are directly contiguous. Nucleic acids which hybridize to the complement of these 20 contiguous polynucleotides under stringent hybridization conditions or alternatively, under lower stringency conditions, are also encompassed by the invention. Polypeptides encoded by these polynucleotides and/or nucleic acids, other polynucleotides and/or nucleic acids that encode these polypeptides, and antibodies that bind these polypeptides are also encompassed by the invention. Additionally, fragments and variants of the above-described polynucleotides, nucleic acids, and polypeptides are also encompassed by the invention.

[0132] In additional specific embodiments, polynucleotides of the invention comprise, or alternatively consist of a polynucleotide sequence in which the 3′ 10 polynucleotides of one of the sequences delineated in column 6 of Table 1B and the 5′ 10 polynucleotides of a fragment or variant of the sequence of SEQ ID NO:X (e.g., as described herein) are directly contiguous Nucleic acids which hybridize to the complement of these 20 contiguous polynucleotides under stringent hybridization conditions or alternatively, under lower stringency conditions, are also encompassed by the invention. Polypeptides encoded by these polynucleotides and/or nucleic acids, other polynucleotides and/or nucleic acids encoding these polypeptides, and antibodies that bind these polypeptides are also encompassed by the invention. Additionally, fragments and variants of the above-described polynucleotides, nucleic acids, and polypeptides are also encompassed by the invention.

[0133] In further specific embodiments, polynucleotides of the invention comprise, or alternatively consist of a polynucleotide sequence in which the 3′ 10 polynucleotides of a fragment or variant of the sequence of SEQ I) NO:X and the 5′ 10 polynucleotides of the sequence of one of the sequences delineated in column 6 of Table 1B are directly contiguous. Nucleic acids which hybridize to the complement of these 20 contiguous polynucleotides under stringent hybridization conditions or alternatively, under lower stringency conditions, are also encompassed by the invention. Polypeptides encoded by these polynucleotides and/or nucleic acids, other polynucleotides and/or nucleic acids encoding these polypeptides, and antibodies that bind these polypeptides are also encompassed by the invention. Additionally, fragments and variants of the above-described polynucleotides, nucleic acids, and polypeptides are also encompassed by the invention.

[0134] In specific embodiments, polynucleotides of the invention comprise, or alternatively consist of a polynucleotide sequence in which the 3′ 10 polynucleotides of one of the sequences delineated in column 6 of Table 1B and the 5′ 10 polynucleotides of another sequence in column 6 are directly contiguous. In preferred embodiments, the 3′ 10 polynucleotides of one of the sequences delineated in column 6 of Table 1B is directly contiguous with the 5′ 10 polynucleotides of the next sequential exon delineated in Table 1B, column 6. Nucleic acids which hybridize to the complement of these 20 contiguous polynucleotides under stringent hybridization conditions or alternatively, under lower stringency conditions, are also encompassed by the invention. Polypeptides encoded by these polynucleotides and/or nucleic acids, other polynucleotides and/or nucleic acids encoding these polypeptides, and antibodies that bind these polypeptides are also encompassed by the invention. Additionally, fragments and variants of the above-described polynucleotides, nucleic acids, and polypeptides are also encompassed by the invention.

[0135] In the present invention, a “polypeptide fragment” refers to an amino acid sequence which is a portion of that contained in SEQ ID NO:Y, a portion of an amino acid sequence encoded by the portion of SEQ ID NO:X as defined in columnns 8 and 9 of Table 2, a portion of an amino acid sequence encoded by the polynucleotide sequence of SEQ ID NO:X, a portion of an amino acid sequence encoded by the complement of the polynucleotide sequence in SEQ ID NO:X, and/or a portion of an amino acid sequence encoded by the cDNA contained in Clone ID NO:Z. Protein (polypeptide) fragments may be “free-standing,” or comprised within a larger polypeptide of which the fragment forms a part or region, most preferably as a single continuous region. Representative examples of polypeptide fragments of the invention, include, for example, fragments comprising, or alternatively consisting of, from about amino acid number 1-20, 21-40, 41-60, 61-80, 81-100, 101-120, 121-140, 141-160, 161-180, 181-200, 201-220, 221-240, 241-260, 261-280, 281-300, 301-320, 321-340, 341-360, 361-380, 381-400, 401-420, 421-440, 441-460, 461-480, 481-500, 501-520, 521-540, 541-560, 561-580, 581-600, 601-620, 621-640, 641-660, 661-680, 681-700, 701-720, 721-740, 741-760, 761-780, 781-800, 801-820, 821-840, 841-860, 861-880, 881-900, 901-920, 921-940, 941-960, 961-980, 981-1000, 1001-1020, 1021-1040, 1041-1060, 1061-1080, 1081-1100, 1101-1120, 1121-1140, 1141-1160, 1161-1180, 1181-1200, 1201-1220, 1221-1240, 1241-1260, 1261-1280, 1281-1300, 1301-1320, 1321-1340, 1341-1360, 1361-1380, 1381-1400, 1401-1420, 1421-1440, or 1441 to the end of the coding region of cDNA and SEQ ID NO: Y. In a preferred embodiment, polypeptide fragments of the invention include, for example, fragments comprising, or alternatively consisting of, from about amino acid number 1-20, 21-40, 41-60, 61-80, 81-100, 101-120, 121-140, 141-160, 161-180, 181-200, 201-220, 221-240, 241-260, 261-280, 281-300, 301-320, 321-340, 341-360, 361-380, 381-400, 401-420, 421-440, 441-460, 461-480, 481-500, 501-520, 521-540, 541-560, 561-580, 581-600, 601-620, 621-640, 641-660, 661-680, 681-700, 701-720, 721-740, 741-760, 761-780, 781-800, 801-820, 821-840, 841-860, 861-880, 881-900, 901-920, 921-940, 941-960, 961-980, 981-1000, 1001-1020, 1021-1040, 1041-1060, 1061-1080, 1081-1100, 1101-1120, 1121-1140, 1141-1160, 1161-1180, 1181-1200, 1201-1220, 1221-1240, 1241-1260, 1261-1280, 1281-1300, 1301-1320, 1321-1340, 1341-1360, 1361-1380, 1381-1400, 1401-1420, 1421-1440, or 1441 to the end of the coding region of SEQ ID NO:Y. Moreover, polypeptide fragments of the invention may be at least about 10, 15, 20, 25, 30, 35, 40, 45, 50, 55, 60, 65, 70, 75, 80, 85, 90, 100, 110, 120, 130, 140, or 150 amino acids in length. In this context “about” includes the particularly recited ranges or values, or ranges or values larger or smaller by several (5, 4, 3, 2, or 1) amino acids, at either extreme or at both extremes. Polynucleotides encoding these polypeptide fragments are also encompassed by the invention.

[0136] Even if deletion of one or more amino acids from the N-terminus of a protein results in modification of loss of one or more biological functions of the protein, other functional activities (e.g., biological activities, ability to multimerize, ability to bind a ligand) may still be retained. For example, the ability of shortened muteins to induce and/or bind to antibodies which recognize the complete or mature forms of the polypeptides generally will be retained when less than the majority of the residues of the complete or mature polypeptide are removed from the N-terminus. Whether a particular polypeptide lacking N-terminal residues of a complete polypeptide retains such immunologic activities can readily be determined by routine methods described herein and otherwise known in the art. It is not unlikely that a mutein with a large number of deleted N-terminal amino acid residues may retain some biological or immunogenic activities. In fact, peptides composed of as few as six amino acid residues may often evoke an immune response.

[0137] Accordingly, polypeptide fragments include the secreted protein as well as the mature form. Further preferred polypeptide fragments include the secreted protein or the mature form having a continuous series of deleted residues from the amino or the carboxy terminus, or both. For example, any number of amino acids, ranging from 1-60, can be deleted from the amino terminus of either the secreted polypeptide or the mature form. Similarly, any number of amino acids, ranging from 1-30, can be deleted from the carboxy terminus of the secreted protein or mature form. Furthermore, any combination of the above amino and carboxy terminus deletions are preferred. Similarly, polynucleotides encoding these polypeptide fragments are also preferred.

[0138] The present invention further provides polypeptides having one or more residues deleted from the amino terminus of the amino acid sequence of a polypeptide disclosed herein (e.g., a polypeptide of SEQ ID NO:Y, a polypeptide encoded by the polynucleotide sequence contained in SEQ ID NO:X or the complement thereof, a polypeptide encoded by the portion of SEQ ID NO:X as defined in columns 8 and 9 of Table 2, a polypeptide encoded by the portion of SEQ ID NO:B as defined in column 6 of Table 1B, and/or a polypeptide encoded by the cDNA contained in Clone ID NO:Z). In particular, N-terminal deletions may be described by the general formula m-q, where q is a whole integer representing the total number of amino acid residues in a polypeptide of the invention (e.g., the polypeptide disclosed in SEQ ID NO:Y, or the polypeptide encoded by the portion of SEQ ID NO:X as defined in columns 8 and 9 of Table 2), and m is defined as any integer ranging from 2 to q-6. Polynucleotides encoding these polypeptides are also encompassed by the invention.

[0139] The present invention further provides polypeptides having one or more residues from the carboxy terminus of the amino acid sequence of a polypeptide disclosed herein (e.g., a polypeptide of SEQ ID NO:Y, a polypeptide encoded by the polynucleotide sequence contained in SEQ ID NO:X, a polypeptide encoded by the portion of SEQ ID NO:X as defined in columns 8 and 9 of Table 2, and/or a polypeptide encoded by the cDNA contained in Clone ID NO:Z). In particular, C-terminal deletions may be described by the general formula 1-n, where n is any whole integer ranging from 6 to q-1, and where n corresponds to the position of amino acid residue in a polypeptide of the invention. Polynucleotides encoding these polypeptides are also encompassed by the invention.

[0140] In addition, any of the above described N- or C-terminal deletions can be combined to produce a N- and C-terminal deleted polypeptide. The invention also provides polypeptides having one or more amino acids deleted from both the amino and the carboxyl termini, which may be described generally as having residues m-n of a polypeptide encoded by SEQ ID NO:X (e.g., including, but not limited to, the preferred polypeptide disclosed as SEQ ID NO:Y and the polypeptide encoded by the portion of SEQ ID NO:X as defined in columns 8 and 9 of Table 2), the cDNA contained in Clone ID NO:Z, and/or the complement thereof, where n and m are integers as described above. Polynucleotides encoding these polypeptides are also encompassed by the invention.

[0141] Also as mentioned above, even if deletion of one or more amino acids from the C-terminus of a protein results in modification of loss of one or more biological functions of the protein, other functional activities (e.g., biological activities, ability to multimerize, ability to bind a ligand) may still be retained. For example the ability of the shortened mutein to induce and/or bind to antibodies which recognize the complete or mature forms of the polypeptide generally will be retained when less than the majority of the residues of the complete or mature polypeptide are removed from the C-terminus. Whether a particular polypeptide lacking C-terminal residues of a complete polypeptide retains such immunologic activities can readily be determined by routine methods described herein and otherwise known in the art. It is not unlikely that a mutein with a large number of deleted C-terminal amino acid residues may retain some biological or immunogenic activities. In fact, peptides composed of as few as six amino acid residues may often evoke an immune response.

[0142] The present application is also directed to proteins containing polypeptides at least 80%, 85%, 90%, 95%, 96%, 97%, 98% or 99% identical to a polypeptide sequence set forth herein. In preferred embodiments, the application is directed to proteins containing polypeptides at least 80%, 85%, 90%, 95%, 96%, 97%, 98% or 99% identical to polypeptides having the amino acid sequence of the specific N- and C-terminal deletions. Polynucleotides encoding these polypeptides are also encompassed by the invention.

[0143] Any polypeptide sequence encoded by, for example, the polynucleotide sequences set forth as SEQ ID NO:X or the complement thereof, (presented, for example, in Tables 1A and 2), the cDNA contained in Clone ID NO:Z, or the polynucleotide sequence as defined in column 6 of Table 1B, may be analyzed to determine certain preferred regions of the polypeptide. For example, the amino acid sequence of a polypeptide encoded by a polynucleotide sequence of SEQ ID NO:X (e.g., the polypeptide of SEQ ID NO:Y and the polypeptide encoded by the portion of SEQ ID NO:X as defined in columnns 8 and 9 of Table 2) or the cDNA contained in Clone ID NO:Z may be analyzed using the default parameters of the DNASTAR computer algorithm (DNASTAR, Inc., 1228 S. Park St., Madison, Wis. 53715 USA; http://www.dnastar.com/).

[0144] Polypeptide regions that may be routinely obtained using the DNASTAR computer algorithm include, but are not limited to, Garnier-Robson alpha-regions, beta-regions, turn-regions, and coil-regions; Chou-Fasman alpha-regions, beta-regions, and turn-regions; Kyte-Doolittle hydrophilic regions and hydrophobic regions; Eisenberg alpha- and beta-amphipathic regions; Karplus-Schulz flexible regions; Emini surface-forming regions; and Jameson-Wolf regions of high antigenic index. Among highly preferred polynucleotides of the invention in this regard are those that encode polypeptides comprising regions that combine several structural features, such as several (e.g., 1, 2, 3 or 4) of the features set out above.

[0145] Additionally, Kyte-Doolittle hydrophilic regions and hydrophobic regions, Emini surface-forming regions, and Jameson-Wolf regions of high antigenic index (i.e., containing four or more contiguous amino acids having an antigenic index of greater than or equal to 1.5, as identified using the default parameters of the Jameson-Wolf program) can routinely be used to determine polypeptide regions that exhibit a high degree of potential for antigenicity. Regions of high antigenicity are determined from data by DNASTAR analysis by choosing values which represent regions of the polypeptide which are likely to be exposed on the surface of the polypeptide in an environment in which antigen recognition may occur in the process of initiation of an immune response.

[0146] Preferred polypeptide fragments of the invention are fragments comprising, or alternatively, consisting of, an amino acid sequence that displays a functional activity (e.g. biological activity) of the polypeptide sequence of which the amino acid sequence is a fragment. By a polypeptide displaying a “functional activity” is meant a polypeptide capable of one or more known functional activities associated with a full-length protein, such as, for example, biological activity, antigenicity, immunogenicity, and/or multimerization, as described herein.

[0147] Other preferred polypeptide fragments are biologically active fragments. Biologically active fragments are those exhibiting activity similar, but not necessarily identical, to an activity of the polypeptide of the present invention. The biological activity of the fragments may include an improved desired activity, or a decreased undesirable activity.

[0148] In preferred embodiments, polypeptides of the invention comprise, or alternatively consist of, one, two, three, four, five or more of the antigenic fragments of the polypeptide of SEQ ID NO:Y, or portions thereof. Polynucleotides encoding these polypeptides are also encompassed by the invention.

[0149] The present invention encompasses polypeptides comprising, or alternatively consisting of, an epitope of: the polypeptide sequence shown in SEQ ID NO:Y; a polypeptide sequence encoded by SEQ ID NO:X or the complementary strand thereto; the polypeptide sequence encoded by the portion of SEQ ID NO:X as defined in columns 8 and 9 of Table 2; the polypeptide sequence encoded by the portion of SEQ ID NO:B as defined in column 6 of Table 1B or the complement thereto; the polypeptide sequence encoded by the cDNA contained in Clone ID NO:Z; or the polypeptide sequence encoded by a polynucleotide that hybridizes to the sequence of SEQ ID NO:X, the complement of the sequence of SEQ ID NO:X, the complement of a portion of SEQ ID NO:X as defined in columns 8 and 9 of Table 2, or the cDNA sequence contained in Clone ID NO:Z under stringent hybridization conditions or alternatively, under lower stringency hybridization as defined supra. The present invention further encompasses polynucleotide sequences encoding an epitope of a polypeptide sequence of the invention (such as, for example, the sequence disclosed in SEQ ID NO:X, or a fragment thereof), polynucleotide sequences of the complementary strand of a polynucleotide sequence encoding an epitope of the invention, and polynucleotide sequences which hybridize to the complementary strand under stringent hybridization conditions or alternatively, under lower stringency hybridization conditions defined supra.

[0150] The term “epitopes,” as used herein, refers to portions of a polypeptide having antigenic or immunogenic activity in an animal, preferably a mammal, and most preferably in a human. In a preferred embodiment, the present invention encompasses a polypeptide comprising an epitope, as well as the polynucleotide encoding this polypeptide. An “immunogenic epitope,” as used herein, is defined as a portion of a protein that elicits an antibody response in an animal, as determined by any method known in the art, for example, by the methods for generating antibodies described infra. (See, for example, Geysen et al., Proc. Natl. Acad. Sci. USA 81:3998-4002 (1983)). The term “antigenic epitope,” as used herein, is defined as a portion of a protein to which an antibody can immunospecifically bind its antigen as determined by any method well known in the art, for example, by the immunoassays described herein. Immunospecific binding excludes non-specific binding but does not necessarily exclude cross- reactivity with other antigens. Antigenic epitopes need not necessarily be immunogenic.

[0151] Fragments which function as epitopes may be produced by any conventional means. (See, e.g., Houghten, R. A., Proc. Natl. Acad. Sci. USA 82:5131-5135 (1985) further described in U.S. Pat. No. 4,631,211.)

[0152] In the present invention, antigenic epitopes preferably contain a sequence of at least 4, at least 5, at least 6, at least 7, more preferably at least 8, at least 9, at least 10, at 11, at least 12, at least 13, at least 14, at least 15, at least 20, at least 25, at least 30, at least 40, at least 50, and, most preferably, between about 15 to about 30 amino acids. Preferred polypeptides comprising immunogenic or antigenic epitopes are at least 10, 15, 20, 25, 30, 35, 40, 45, 50, 55, 60, 65, 70, 75, 80, 85, 90, 95, or 100 amino acid residues in length. Additional non-exclusive preferred antigenic epitopes include the antigenic epitopes disclosed herein, as well as portions thereof. Antigenic epitopes are useful, for example, to raise antibodies, including monoclonal antibodies, that specifically bind the epitope. Preferred antigenic epitopes include the antigenic epitopes disclosed herein, as well as any combination of two, three, four, five or more of these antigenic epitopes. Antigenic epitopes can be used as the target molecules in immunoassays. (See, for instance, Wilson et al., Cell 37:767-778 (1984); Sutcliffe et al., Science 219:660-666 (1983)).

[0153] Non-limiting examples of epitopes of polypeptides that can be used to generate antibodies of the invention include a polypeptide comprising, or alternatively consisting of, at least one, two, three, four, five, six or more of the portion(s) of SEQ ID NO:Y specified in column 7 of Table 1A. These polypeptide fragments have been determined to bear antigenic epitopes of the proteins of the invention by the analysis of the Jameson-Wolf antigenic index which is included in the DNAStar suite of computer programs. By “comprise” it is intended that a polypeptide contains at least one, two, three, four, five, six or more of the portion(s) of SEQ ID NO:Y shown in column 7 of Table 1A, but it may contain additional flanking residues on either the amino or carboxyl termini of the recited portion. Such additional flanking sequences are preferably sequences naturally found adjacent to the portion; i.e., contiguous sequence shown in SEQ ID NO:Y. The flanking sequence may, however, be sequences from a heterolgous polypeptide, such as from another protein described herein or from a heterologous polypeptide not described herein. In particular embodiments, epitope portions of a polypeptide of the invention comprise one, two, three, or more of the portions of SEQ ID NO:Y shown in column 7 of Table 1A.

[0154] Similarly, immunogenic epitopes can be used, for example, to induce antibodies according to methods well known in the art. See, for instance, Sutcliffe et al., supra; Wilson et al., supra; Chow et al., Proc. Natl. Acad. Sci. USA 82:910-914; and Bittle et al., J. Gen. Virol. 66:2347-2354 (1985). Preferred immunogenic epitopes include the immunogenic epitopes disclosed herein, as well as any combination of two, three, four, five or more of these immunogenic epitopes. The polypeptides comprising one or more immunogenic epitopes may be presented for eliciting an antibody response together with a carrier protein, such as an albumin, to an animal system (such as rabbit or mouse), or, if the polypeptide is of sufficient length (at least about 25 amino acids), the polypeptide may be presented without a carrier. However, immunogenic epitopes comprising as few as 8 to 10 amino acids have been shown to be sufficient to raise antibodies capable of binding to, at the very least, linear epitopes in a denatured polypeptide (e.g., in Western blotting).

[0155] Epitope-bearing polypeptides of the present invention may be used to induce antibodies according to methods well known in the art including, but not limited to, in vivo immunization, in vitro immunization, and phage display methods. See, e.g., Sutcliffe et al., supra; Wilson et al., supra, and Bittle et al., J. Gen. Virol., 66:2347-2354 (1985). If in vivo immunization is used, animals may be immunized with free peptide; however, anti-peptide antibody titer may be boosted by coupling the peptide to a macromolecular carrier, such as keyhole limpet hemacyanin (KLH) or tetanus toxoid. For instance, peptides containing cysteine residues may be coupled to a carrier using a linker such as maleimidobenzoyl- N-hydroxysuccinimide ester (MBS), while other peptides may be coupled to carriers using a more general linking agent such as glutaraldehyde. Animals such as rabbits, rats and mice are immunized with either free or carrier- coupled peptides, for instance, by intraperitoneal and/or intradermal injection of emulsions containing about 100 μg of peptide or carrier protein and Freund's adjuvant or any other adjuvant known for stimulating an immune response. Several booster injections may be needed, for instance, at intervals of about two weeks, to provide a useful titer of anti-peptide antibody which can be detected, for example, by ELISA assay using free peptide adsorbed to a solid surface. The titer of anti-peptide antibodies in serum from an immunized animal may be increased by selection of anti-peptide antibodies, for instance, by adsorption to the peptide on a solid support and elution of the selected antibodies according to methods well known in the art.

[0156] As one of skill in the art will appreciate, and as discussed above, the polypeptides of the present invention (e.g., those comprising an immunogenic or antigenic epitope) can be fused to heterologous polypeptide sequences. For example, polypeptides of the present invention (including fragments or variants thereof), may be fused with the constant domain of immunoglobulins (IgA, IgE, IgG, IgM), or portions thereof (CH1, CH2, CH3, or any combination thereof and portions thereof, resulting in chimeric polypeptides. By way of another non-limiting example, polypeptides and/or antibodies of the present invention (including fragments or variants thereof) may be fused with albumin (including but not limited to recombinant human serum albumin or fragments or variants thereof (see, e.g., U.S. Pat. No. 5,876,969, issued Mar. 2, 1999, EP Patent 0 413 622, and U.S. Pat. No. 5,766,883, issued Jun. 16, 1998, herein incorporated by reference in their entirety)). In a preferred embodiment, polypeptides and/or antibodies of the present invention (including fragments or variants thereof) are fused with the mature form of human serum albumin (i.e., amino acids 1-585 of human serum albumin as shown in FIGS. 1 and 2 of EP Patent 0 322 094) which is herein incorporated by reference in its entirety. In another preferred embodiment, polypeptides and/or antibodies of the present invention (including fragments or variants thereof) are fused with polypeptide fragments comprising, or alternatively consisting of, amino acid residues l-z of human serum albumin, where z is an integer from 369 to 419, as described in U.S. Pat. No. 5,766,883 herein incorporated by reference in its entirety. Polypeptides and/or antibodies of the present invention (including fragments or variants thereof may be fused to either the N- or C-terminal end of the heterologous protein (e.g., immunoglobulin Fc polypeptide or human serum albumin polypeptide). Polynucleotides encoding fusion proteins of the invention are also encompassed by the invention.

[0157] Such fusion proteins as those described above may facilitate purification and may increase half-life in vivo. This has been shown for chimeric proteins consisting of the first two domains of the human CD4-polypeptide and various domains of the constant regions of the heavy or light chains of mammalian immunoglobulins. See, e.g., EP 394,827; Traunecker et al., Nature, 331:84-86 (1988). Enhanced delivery of an antigen across the epithelial barrier to the immune system has been demonstrated for antigens (e.g., insulin) conjugated to an FcRn binding partner such as IgG or Fc fragments (see, e.g., PCT Publications WO 96/22024 and WO 99/04813). IgG fusion proteins that have a disulfide-linked dimeric structure due to the IgG portion desulfide bonds have also been found to be more efficient in binding and neutralizing other molecules than monomeric polypeptides or fragments thereof alone. See, e.g., Fountoulakis et al., J. Biochem., 270:3958-3964 (1995). Nucleic acids encoding the above epitopes can also be recombined with a gene of interest as an epitope tag (e.g., the hemagglutinin (HA) tag or flag tag) to aid in detection and purification of the expressed polypeptide. For example, a system described by Janknecht et al. allows for the ready purification of non-denatured fusion proteins expressed in human cell lines (Janknecht et al., 1991, Proc. Natl. Acad. Sci. USA 88:8972-897). In this system, the gene of interest is subcloned into a vaccinia recombination plasmid such that the open reading frame of the gene is translationally fused to an amino-terminal tag consisting of six histidine residues. The tag serves as a matrix binding domain for the fusion protein. Extracts from cells infected with the recombinant vaccinia virus are loaded onto Ni2+ nitriloacetic acid-agarose column and histidine-tagged proteins can be selectively eluted with imidazole-containing buffers.

### Fusion Proteins

[0158] Any polypeptide of the present invention can be used to generate fusion proteins. For example, the polypeptide of the present invention, when fused to a second protein, can be used as an antigenic tag. Antibodies raised against the polypeptide of the present invention can be used to indirectly detect the second protein by binding to the polypeptide. Moreover, because secreted proteins target cellular locations based on trafficking signals, polypeptides of the present invention which are shown to be secreted can be used as targeting molecules once fused to other proteins.

[0159] Examples of domains that can be fused to polypeptides of the present invention include not only heterologous signal sequences, but also other heterologous functional regions. The fusion does not necessarily need to be direct, but may occur through linker sequences.

[0160] In certain preferred embodiments, proteins of the invention are fusion proteins comprising an amino acid sequence that is an N and/or C- terminal deletion of a polypeptide of the invention. In preferred embodiments, the invention is directed to a fusion protein comprising an amino acid sequence that is at least 90%, 95%, 96%, 97%, 98% or 99% identical to a polypeptide sequence of the invention. Polynucleotides encoding these proteins are also encompassed by the invention.

[0161] Moreover, fusion proteins may also be engineered to improve characteristics of the polypeptide of the present invention. For instance, a region of additional amino acids, particularly charged amino acids, may be added to the N-terminus of the polypeptide to improve stability and persistence during purification from the host cell or subsequent handling and storage. Also, peptide moieties may be added to the polypeptide to facilitate purification. Such regions may be removed prior to final preparation of the polypeptide. The addition of peptide moieties to facilitate handling of polypeptides are familiar and routine techniques in the art.

[0162] As one of skill in the art will appreciate that, as discussed above, polypeptides of the present invention, and epitope-bearing fragments thereof, can be combined with heterologous polypeptide sequences. For example, the polypeptides of the present invention may be fused with heterologous polypeptide sequences, for example, the polypeptides of the present invention may be fused with the constant domain of immunoglobulins (IgA, IgE, IgG, IgM) or portions thereof (CH1, CH2, CH3, and any combination thereof, including both entire domains and portions thereof), or albumin (including, but not limited to, native or recombinant human albumin or fragments or variants thereof (see, e.g., U.S. Pat. No. 5,876,969, issued Mar. 2, 1999, EP Patent 0 413 622, and U.S. Pat. No. 5,766,883, issued Jun. 16, 1998, herein incorporated by reference in their entirety)), resulting in chimeric polypeptides. For example, EP-A-O 464 533 (Canadian counterpart 2045869) discloses fusion proteins comprising various portions of constant region of immunoglobulin molecules together with another human protein or part thereof. In many cases, the Fc part in a fusion protein is beneficial in therapy and diagnosis, and thus can result in, for example, improved pharmacokinetic properties (EP-A 0232 262). Alternatively, deleting the Fc part after the fusion protein has been expressed, detected, and purified, would be desired. For example, the Fc portion may hinder therapy and diagnosis if the fusion protein is used as an antigen for immunizations. In drug discovery, for example, human proteins, such as hIL-5, have been fused with Fc portions for the purpose of high-throughput screening assays to identify antagonists of hIL-5. See, D. Bennett et al., J. Molecular Recognition 8:52-58 (1995); K. Johanson et al., J. Biol. Chem. 270:9459-9471 (1995).

[0163] Moreover, the polypeptides of the present invention can be fused to marker sequences, such as a polypeptide which facilitates purification of the fused polypeptide. In preferred embodiments, the marker amino acid sequence is a hexa-histidine peptide, such as the tag provided in a pQE vector (QIAGEN, Inc., 9259 Eton Avenue, Chatsworth, Calif., 91311), among others, many of which are commercially available. As described in Gentz et al., Proc. Natl. Acad. Sci. USA 86:821-824 (1989), for instance, hexa-histidine provides for convenient purification of the fusion protein. Another peptide tag useful for purification, the “HA” tag, corresponds to an epitope derived from the influenza hemagglutinin protein (Wilson et al., Cell 37:767 (1984)).

[0164] Additional fusion proteins of the invention may be generated through the techniques of gene-shuffling, motif-shuffling, exon-shuffling, and/or codon-shuffling (collectively referred to as “DNA shuffling”). DNA shuffling may be employed to modulate the activities of polypeptides of the invention, such methods can be used to generate polypeptides with altered activity, as well as agonists and antagonists of the polypeptides. See, generally, U.S. Pat. Nos. 5,605,793; 5,811,238; 5,830,721; 5,834,252; and 5,837,458, and Patten et al., Curr. Opinion Biotechnol. 8:724-33 (1997); Harayama, Trends Biotechnol. 16(2):76-82 (1998); Hansson, et al., J. Mol. Biol. 287:265-76 (1999); and Lorenzo and Blasco, Biotechniques 24(2):308-13 (1998) (each of these patents and publications are hereby incorporated by reference in its entirety). In one embodiment, alteration of polynucleotides corresponding to SEQ ID NO:X and the polypeptides encoded by these polynucleotides may be achieved by DNA shuffling. DNA shuffling involves the assembly of two or more DNA segments by homologous or site-specific recombination to generate variation in the polynucleotide sequence. In another embodiment, polynucleotides of the invention, or the encoded polypeptides, may be altered by being subjected to random mutagenesis by error-prone PCR, random nucleotide insertion or other methods prior to recombination. In another embodiment, one or more components, motifs, sections, parts, domains, fragments, etc., of a polynucleotide encoding a polypeptide of the invention may be recombined with one or more components, motifs, sections, parts, domains, fragments, etc. of one or more heterologous molecules.

[0165] Thus, any of these above fusions can be engineered using the polynucleotides or the polypeptides of the present invention.

### Recombinant and Synthetic Production of Polypeptides of the Invention

[0166] The present invention also relates to vectors containing the polynucleotide of the present invention, host cells, and the production of polypeptides by synthetic and recombinant techniques. The vector may be, for example, a phage, plasmid, viral, or retroviral vector. Retroviral vectors may be replication competent or replication defective. In the latter case, viral propagation generally will occur only in complementing host cells.

[0167] The polynucleotides of the invention may be joined to a vector containing a selectable marker for propagation in a host. Generally, a plasmid vector is introduced in a precipitate, such as a calcium phosphate precipitate, or in a complex with a charged lipid. If the vector is a virus, it may be packaged in vitro using an appropriate packaging cell line and then transduced into host cells.

[0168] The polynucleotide insert should be operatively linked to an appropriate promoter, such as the phage lambda PL promoter, the E. coli lac, trp, phoA and tac promoters, the SV40 early and late promoters and promoters of retroviral LTRs, to name a few. Other suitable promoters will be known to the skilled artisan. The expression constructs will further contain sites for transcription initiation, termination, and, in the transcribed region, a ribosome binding site for translation. The coding portion of the transcripts expressed by the constructs will preferably include a translation initiating codon at the beginning and a termination codon (UAA, UGA or UAG) appropriately positioned at the end of the polypeptide to be translated.

[0169] As indicated, the expression vectors will preferably include at least one selectable marker. Such markers include dihydrofolate reductase, G418, glutamine synthase, or neomycin resistance for eukaryotic cell culture, and tetracycline, kanamycin or ampicillin resistance genes for culturing in E. coli and other bacteria. Representative examples of appropriate hosts include, but are not limited to, bacterial cells, such as E. coli, Streptomyces and Salmonella typhimurium cells; fungal cells, such as yeast cells (e.g., Saccharomyces cerevisiae or Pichia pastoris (ATCC Accession No. 201178)); insect cells such as Drosophila S2 and Spodoptera Sf9 cells; animal cells such as CHO, COS, 293, and Bowes melanoma cells; and plant cells. Appropriate culture mediums and conditions for the above-described host cells are known in the art.

[0170] Among vectors preferred for use in bacteria include pQE70, pQE60 and pQE-9, available from QIAGEN, Inc.; pBluescript vectors, Phagescript vectors, pNH8A, pNH16a, pNH18A, pNH46A, available from Stratagene Cloning Systems, Inc.; and ptrc99a, pKK223-3, pKK233-3, pDR540, pRIT5 available from Pharmacia Biotech, Inc. Among preferred eukaryotic vectors are pWLNEO, pSV2CAT, pOG44, pXT1 and pSG available from Stratagene; and pSVK3, pBPV, pMSG and pSVL available from Pharnacia. Preferred expression vectors for use in yeast systems include, but are not limited to pYES2, pYD1, pTEF1/Zeo, pYES2/GS, pPICZ, pGAPZ, pGAPZalph, pPIC9, pPIC3.5, pHIL-D2, pHIL-S1, pPIC3.5K, pPIC9K, and PAO815 (all available from Invitrogen, Carlbad, Calif.). Other suitable vectors will be readily apparent to the skilled artisan.

[0171] Vectors which use glutamine synthase (GS) or DHFR as the selectable markers can be amplified in the presence of the drugs methionine sulphoximine or methotrexate, respectively. An advantage of glutamine synthase based vectors are the availabilty of cell lines (e.g., the murine myeloma cell line, NS0) which are glutamine synthase negative. Glutamine synthase expression systems can also function in glutamine synthase expressing cells (e.g., Chinese Hamster Ovary (CHO) cells) by providing additional inhibitor to prevent the functioning of the endogenous gene. A glutamine synthase expression system and components thereof are detailed in PCT publications: WO87/04462; WO86/05807; WO89/01036; WO89/10404; and WO91/06657, which are hereby incorporated in their entireties by reference herein. Additionally, glutamine synthase expression vectors can be obtained from Lonza Biologics, Inc. (Portsmouth, N.H.). Expression and production of monoclonal antibodies using a GS expression system in murine myeloma cells is described in Bebbington et al., Bio/technology 10:169(1992) and in Biblia and Robinson Biotechnol. Prog. 11:1 (1995) which are herein incorporated by reference.

[0172] The present invention also relates to host cells containing the above-described vector constructs described herein, and additionally encompasses host cells containing nucleotide sequences of the invention that are operably associated with one or more heterologous control regions (e.g., promoter and/or enhancer) using techniques known of in the art. The host cell can be a higher eukaryotic cell, such as a mammalian cell (e.g., a human derived cell), or a lower eukaryotic cell, such as a yeast cell, or the host cell can be a prokaryotic cell, such as a bacterial cell. A host strain may be chosen which modulates the expression of the inserted gene sequences, or modifies and processes the gene product in the specific fashion desired. Expression from certain promoters can be elevated in the presence of certain inducers; thus expression of the genetically engineered polypeptide may be controlled. Furthermore, different host cells have characteristics and specific mechanisms for the translational and post-translational processing and modification (e.g., phosphorylation, cleavage) of proteins. Appropriate cell lines can be chosen to ensure the desired modifications and processing of the foreign protein expressed.

[0173] Introduction of the nucleic acids and nucleic acid constructs of the invention into the host cell can be effected by calcium phosphate transfection, DEAE-dextran mediated transfection, cationic lipid-mediated transfection, electroporation, transduction, infection, or other methods. Such methods are described in many standard laboratory manuals, such as Davis et al., Basic Methods In Molecular Biology (1986). It is specifically contemplated that the polypeptides of the present invention may in fact be expressed by a host cell lacking a recombinant vector.

[0174] In addition to encompassing host cells containing the vector constructs discussed herein, the invention also encompasses primary, secondary, and immortalized host cells of vertebrate origin, particularly mammalian origin, that have been engineered to delete or replace endogenous genetic material (e.g., the coding sequence), and/or to include genetic material (e.g., heterologous polynucleotide sequences) that is operably associated with polynucleotides of the invention, and which activates, alters, and/or amplifies endogenous polynucleotides. For example, techniques known in the art may be used to operably associate heterologous control regions (e.g., promoter and/or enhancer) and endogenous polynucleotide sequences via homologous recombination (see, e.g., U.S. Pat. No. 5,641,670, issued Jun. 24, 1997; International Publication Number WO 96/29411; International Publication Number WO 94/12650; Koller et al., Proc. Natl. Acad. Sci. USA 86:8932-8935 (1989); and Zijlstra et al., Nature 342:435-438 (1989), the disclosures of each of which are incorporated by reference in their entireties).

[0175] Polypeptides of the invention can be recovered and purified from recombinant cell cultures by well-known methods including ammonium sulfate or ethanol precipitation, acid extraction, anion or cation exchange chromatography, phosphocellulose chromatography, hydrophobic interaction chromatography, affinity chromatography, hydroxylapatite chromatography and lectin chromatography. Most preferably, high performance liquid chromatography (“HPLC”) is employed for purification.

[0176] Polypeptides of the present invention can also be recovered from: products purified from natural sources, including bodily fluids, tissues and cells, whether directly isolated or cultured; products of chemical synthetic procedures; and products produced by recombinant techniques from a prokaryotic or eukaryotic host, including, for example, bacterial, yeast, higher plant, insect, and mammalian cells. Depending upon the host employed in a recombinant production procedure, the polypeptides of the present invention may be glycosylated or may be non-glycosylated. In addition, polypeptides of the invention may also include an initial modified methionine residue, in some cases as a result of host-mediated processes. Thus, it is well known in the art that the N-terminal methionine encoded by the translation initiation codon generally is removed with high efficiency from any protein after translation in all eukaryotic cells. While the N-terminal methionine on most proteins also is efficiently removed in most prokaryotes, for some proteins, this prokaryotic removal process is inefficient, depending on the nature of the amino acid to which the N-terminal methionine is covalently linked.

[0177] In one embodiment, the yeast Pichia pastoris is used to express polypeptides of the invention in a eukaryotic system. Pichia pastoris is a methylotrophic yeast which can metabolize methanol as its sole carbon source. A main step in the methanol metabolization pathway is the oxidation of methanol to formaldehyde using O₂. This reaction is catalyzed by the enzyme alcohol oxidase. In order to metabolize methanol as its sole carbon source, Pichia pastoris must generate high levels of alcohol oxidase due, in part, to the relatively low affinity of alcohol oxidase for O₂. Consequently, in a growth medium depending on methanol as a main carbon source, the promoter region of one of the two alcohol oxidase genes (AOX1) is highly active. In the presence of methanol, alcohol oxidase produced from the AOX1 gene comprises up to approximately 30% of the total soluble protein in Pichia pastoris. See Ellis, S. B., et al., Mol. Cell Biol. 5:1111-21 (1985); Koutz, P. J, et al., Yeast 5:167-77 (1989); Tschopp, J. F., et al., Nucl. Acids Res. 15:3859-76 (1987). Thus, a heterologous coding sequence, such as, for example, a polynucleotide of the present invention, under the transcriptional regulation of all or part of the AOX1 regulatory sequence is expressed at exceptionally high levels in Pichia yeast grown in the presence of methanol.

[0178] In one example, the plasmid vector pPIC9K is used to express DNA encoding a polypeptide of the invention, as set forth herein, in a Pichea yeast system essentially as described in “Pichia Protocols: Methods in Molecular Biology,” D. R. Higgins and J. Cregg, eds. The Humana Press, Totowa, N.J., 1998. This expression vector allows expression and secretion of a polypeptide of the invention by virtue of the strong AOX1 promoter linked to the Pichia pastoris alkaline phosphatase (PHO) secretory signal peptide (i.e., leader) located upstream of a multiple cloning site.

[0179] Many other yeast vectors could be used in place of pPIC9K, such as, pYES2, pYD1, pTEF1/Zeo, pYES2/GS, pPICZ, pGAPZ, pGAPZalpha, pPIC9, pPIC3.5, pHIL-D2, pHIL-S1, pPIC3.5K, and PAO815, as one skilled in the art would readily appreciate, as long as the proposed expression construct provides appropriately located signals for transcription, translation, secretion (if desired), and the like, including an in-frame AUG as required.

[0180] In another embodiment, high-level expression of a heterologous coding sequence, such as, for example, a polynucleotide of the present invention, may be achieved by cloning the heterologous polynucleotide of the invention into an expression vector such as, for example, pGAPZ or pGAPZalpha, and growing the yeast culture in the absence of methanol.

[0181] In addition to encompassing host cells containing the vector constructs discussed herein, the invention also encompasses primary, secondary, and immortalized host cells of vertebrate origin, particularly mammalian origin, that have been engineered to delete or replace endogenous genetic material (e.g., coding sequence), and/or to include genetic material (e.g., heterologous polynucleotide sequences) that is operably associated with polynucleotides of the invention, and which activates, alters, and/or amplifies endogenous polynucleotides. For example, techniques known in the art may be used to operably associate heterologous control regions (e.g., promoter and/or enhancer) and endogenous polynucleotide sequences via homologous recombination (see, e.g., U.S. Pat. No. 5,641,670, issued Jun. 24, 1997; International Publication No. WO 96/29411, published Sep. 26, 1996; International Publication No. WO 94/12650, published Aug. 4, 1994; Koller et al., Proc. Natl. Acad. Sci. USA 86:8932-8935 (1989); and Zijlstra et al., Nature 342:435-438 (1989), the disclosures of each of which are incorporated by reference in their entireties).

[0182] In addition, polypeptides of the invention can be chemically synthesized using techniques known in the art (e.g., see Creighton, 1983, Proteins: Structures and Molecular Principles, W. H. Freeman & Co., N.Y., and Hunkapiller et al., Nature, 310:105-111 (1984)). For example, a polypeptide corresponding to a fragment of a polypeptide can be synthesized by use of a peptide synthesizer. Furthermore, if desired, nonclassical amino acids or chemical amino acid analogs can be introduced as a substitution or addition into the polypeptide sequence. Non-classical amino acids include, but are not limited to, to the D-isomers of the common amino acids, 2,4-diaminobutyric acid, a-amino isobutyric acid, 4-aminobutyric acid, Abu, 2-amino butyric acid, g-Abu, e-Ahx, 6-amino hexanoic acid, Aib, 2-amino isobutyric acid, 3-amino propionic acid, ornithine, norleucine, norvaline, hydroxyproline, sarcosine, citrulline, homocitrulline, cysteic acid, t-butylglycine, t-butylalanine, phenylglycine, cyclohexylalanine, b-alanine, fluoro-amino acids, designer amino acids such as b-methyl amino acids, Ca-methyl amino acids, Na-methyl amino acids, and amino acid analogs in general. Furthermore, the amino acid can be D (dextrorotary) or L (levorotary).

[0183] The invention encompasses polypeptides of the present invention which are differentially modified during or after translation, e.g., by glycosylation, acetylation, phosphorylation, amidation, derivatization by known protecting/blocking groups, proteolytic cleavage, linkage to an antibody molecule or other cellular ligand, etc. Any of numerous chemical modifications may be carried out by known techniques, including but not limited, to specific chemical cleavage by cyanogen bromide, trypsin, chymotrypsin, papain, V8 protease, NaBH₄; acetylation, formylation, oxidation, reduction; metabolic synthesis in the presence of tunicamycin; etc.

[0184] Additional post-translational modifications encompassed by the invention include, for example, e.g., N-linked or O-linked carbohydrate chains, processing of N-terminal or C-terminal ends), attachment of chemical moieties to the amino acid backbone, chemical modifications of N-linked or O-linked carbohydrate chains, and addition or deletion of an N-terminal methionine residue as a result of procaryotic host cell expression. The polypeptides may also be modified with a detectable label, such as an enzymatic, fluorescent, isotopic or affinity label to allow for detection and isolation of the protein.

[0185] Examples of suitable enzymes include horseradish peroxidase, alkaline phosphatase, beta-galactosidase, or acetylcholinesterase; examples of suitable prosthetic group complexes include streptavidin/biotin and avidin/biotin; examples of suitable fluorescent materials include umbelliferone, fluorescein, fluorescein isothiocyanate, rhodamine, dichlorotriazinylamine fluorescein, dansyl chloride or phycoerythrin; an example of a luminescent material includes luminol; examples of bioluminescent materials include luciferase, luciferin, and aequorin; and examples of suitable radioactive material include iodine (¹²¹I, ¹²³I, ¹²⁵I, ¹³¹I), carbon (¹⁴C), sulfur (³⁵S), tritium (³H), indium (¹¹¹In, ¹¹²In, ^{113m}In, ^{115m}In), technetium (⁹⁹Tc,^{99m}Tc), thallium (²⁰¹Ti), gallium (⁶⁸Ga, ⁶⁷Ga), palladium (¹⁰³Pd), molybdenum (⁹⁹Mo), xenon (¹³³Xe), fluorine (¹⁸F), ¹⁵³Sm, ¹⁷⁷Lu, ¹⁵⁹Gd, ¹⁴⁹Pm, ¹⁴⁰La, ¹⁷⁵Yb, ¹⁶⁶Ho, ⁹⁰Y, ⁴⁷Sc, ¹⁸⁶Re, ¹⁸⁸Re, ¹⁴²Pr, ¹⁰⁵Rh, and ⁹⁷Ru.

[0186] In specific embodiments, a polypeptide of the present invention or fragment or variant thereof is attached to macrocyclic chelators that associate with radiometal ions, including but not limited to, ¹⁷⁷Lu, ⁹⁰Y, ¹⁶⁶Ho, and ¹⁵³Sm, to polypeptides. In a preferred embodiment, the radiometal ion associated with the macrocyclic chelators is ¹¹¹In. In another preferred embodiment, the radiometal ion associated with the macrocyclic chelator is ⁹⁰Y. In specific embodiments, the macrocyclic chelator is 1,4,7,10-tetraazacyclododecane-N,N′,N″,N′″-tetraacetic acid (DOTA). In other specific embodiments, DOTA is attached to an antibody of the invention or fragment thereof via a linker molecule. Examples of linker molecules useful for conjugating DOTA to a polypeptide are commonly known in the art—see, for example, DeNardo et al., Clin Cancer Res. 4(10):2483-90 (1998); Peterson et al., Bioconjug. Chem. 10(4):553-7 (1999); and Zimmerman et al, Nucl. Med. Biol. 26(8):943-50 (1999); which are hereby incorporated by reference in their entirety.

[0187] As mentioned, the proteins of the invention may be modified by either natural processes, such as posttranslational processing, or by chemical modification techniques which are well known in the art. It will be appreciated that the same type of modification may be present in the same or varying degrees at several sites in a given polypeptide. Polypeptides of the invention may be branched, for example, as a result of ubiquitination, and they may be cyclic, with or without branching. Cyclic, branched, and branched cyclic polypeptides may result from posttranslation natural processes or may be made by synthetic methods. Modifications include acetylation, acylation, ADP-ribosylation, amidation, covalent attachment of flavin, covalent attachment of a heme moiety, covalent attachment of a nucleotide or nucleotide derivative, covalent attachment of a lipid or lipid derivative, covalent attachment of phosphotidylinositol, cross-linking, cyclization, disulfide bond formation, demethylation, formation of covalent cross-links, formation of cysteine, formation of pyroglutamate, formylation, gamma-carboxylation, glycosylation, GPI anchor formation, hydroxylation, iodination, methylation, myristoylation, oxidation, pegylation, proteolytic processing, phosphorylation, prenylation, racemization, selenoylation, sulfation, transfer-RNA mediated addition of amino acids to proteins such as arginylation, and ubiquitination. (See, for instance, PROTEINS—STRUCTURE AND MOLECULAR PROPERTIES, 2nd Ed., T. E. Creighton, W. H. Freeman and Company, New York (1993); POSTTRANSLATIONAL COVALENT MODIFICATION OF PROTEINS, B. C. Johnson, Ed., Academic Press, New York, pgs. 1-12 (1983); Seifter et al., Meth. Enzymol. 182:626-646 (1990); Rattan et al., Ann. N.Y. Acad. Sci. 663:48-62 (1992)).

[0188] Also provided by the invention are chemically modified derivatives of the polypeptides of the invention which may provide additional advantages such as increased solubility, stability and circulating time of the polypeptide, or decreased immunogenicity (see U.S. Pat. No. 4,179,337). The chemical moieties for derivitization may be selected from water soluble polymers such as polyethylene glycol, ethylene glycol/propylene glycol copolymers, carboxymethylcellulose, dextran, polyvinyl alcohol and the like. The polypeptides may be modified at random positions within the molecule, or at predetermined positions within the molecule and may include one, two, three or more attached chemical moieties.

[0189] The polymer may be of any molecular weight, and may be branched or unbranched. For polyethylene glycol, the preferred molecular weight is between about 1 kDa and about 100 kDa (the term “about” indicating that in preparations of polyethylene glycol, some molecules will weigh more, some less, than the stated molecular weight) for ease in handling and manufacturing. Other sizes may be used, depending on the desired therapeutic profile (e.g., the duration of sustained release desired, the effects, if any on biological activity, the ease in handling, the degree or lack of antigenicity and other known effects of the polyethylene glycol to a therapeutic protein or analog). For example, the polyethylene glycol may have an average molecular weight of about 200, 500, 1000, 1500, 2000, 2500, 3000, 3500, 4000, 4500, 5000, 5500, 6000, 6500, 7000, 7500, 8000, 8500, 9000, 9500, 10,000, 10,500, 11,000, 11,500, 12,000, 12,500, 13,000, 13,500, 14,000, 14,500, 15,000, 15,500, 16,000, 16,500, 17,000, 17,500, 18,000, 18,500, 19,000, 19,500, 20,000, 25,000, 30,000, 35,000, 40,000, 45,000, 50,000, 55,000, 60,000, 65,000, 70,000, 75,000, 80,000, 85,000, 90,000, 95,000, or 100,000 kDa.

[0190] As noted above, the polyethylene glycol may have a branched structure. Branched polyethylene glycols are described, for example, in U.S. Pat. No. 5,643,575; Morpurgo et al., Appl. Biochem. Biotechnol. 56:59-72 (1996); Vorobjev et al., Nucleosides Nucleotides 18:2745-2750 (1999); and Caliceti et al., Bioconjug. Chem. 10:638-646 (1999), the disclosures of each of which are incorporated herein by reference.

[0191] The polyethylene glycol molecules (or other chemical moieties) should be attached to the protein with consideration of effects on functional or antigenic domains of the protein. There are a number of attachment methods available to those skilled in the art, such as, for example, the method disclosed in EP 0 401 384 (coupling PEG to G-CSF), herein incorporated by reference; see also Malik et al., Exp. Hematol. 20:1028-1035 (1992), reporting pegylation of GM-CSF using tresyl chloride. For example, polyethylene glycol may be covalently bound through amino acid residues via a reactive group, such as a free amino or carboxyl group. Reactive groups are those to which an activated polyethylene glycol molecule may be bound. The amino acid residues having a free amino group may include lysine residues and the N-terminal amino acid residues; those having a free carboxyl group may include aspartic acid residues glutamic acid residues and the C-terminal amino acid residue. Sulfhydryl groups may also be used as a reactive group for attaching the polyethylene glycol molecules. Preferred for therapeutic purposes is attachment at an amino group, such as attachment at the N-terminus or lysine group.

[0192] As suggested above, polyethylene glycol may be attached to proteins via linkage to any of a number of amino acid residues. For example, polyethylene glycol can be linked to proteins via covalent bonds to lysine, histidine, aspartic acid, glutamic acid, or cysteine residues. One or more reaction chemistries may be employed to attach polyethylene glycol to specific amino acid residues (e.g., lysine, histidine, aspartic acid, glutamic acid, or cysteine) of the protein or to more than one type of amino acid residue (e.g., lysine, histidine, aspartic acid, glutamic acid, cysteine and combinations thereof) of the protein.

[0193] One may specifically desire proteins chemically modified at the N-terminus. Using polyethylene glycol as an illustration of the present composition, one may select from a variety of polyethylene glycol molecules (by molecular weight, branching, etc.), the proportion of polyethylene glycol molecules to protein (polypeptide) molecules in the reaction mix, the type of pegylation reaction to be performed, and the method of obtaining the selected N-terminally pegylated protein. The method of obtaining the N-terminally pegylated preparation (i.e., separating this moiety from other monopegylated moieties if necessary) may be by purification of the N-terminally pegylated material from a population of pegylated protein molecules. Selective proteins chemically modified at the N-terminus modification may be accomplished by reductive alkylation which exploits differential reactivity of different types of primary amino groups (lysine versus the N-terminal) available for derivatization in a particular protein. Under the appropriate reaction conditions, substantially selective derivatization of the protein at the N-terminus with a carbonyl group containing polymer is achieved.

[0194] As indicated above, pegylation of the proteins of the invention may be accomplished by any number of means. For example, polyethylene glycol may be attached to the protein either directly or by an intervening linker. Linkerless systems for attaching polyethylene glycol to proteins are described in Delgado et al., Crit. Rev. Thera. Drug Carrier Sys. 9:249-304 (1992); Francis et al., Intern. J. of Hematol. 68:1-18 (1998); U.S. Pat. No. 4,002,531; U.S. Pat. No. 5,349,052; WO 95/06058; and WO 98/32466, the disclosures of each of which are incorporated herein by reference.

[0195] One system for attaching polyethylene glycol directly to amino acid residues of proteins without an intervening linker employs tresylated MPEG, which is produced by the modification of monethoxy polyethylene glycol (MPEG) using tresylchloride (ClSO₂CH₂CF₃). Upon reaction of protein with tresylated MPEG, polyethylene glycol is directly attached to amine groups of the protein. Thus, the invention includes protein-polyethylene glycol conjugates produced by reacting proteins of the invention with a polyethylene glycol molecule having a 2,2,2-trifluoreothane sulphonyl group.

[0196] Polyethylene glycol can also be attached to proteins using a number of different intervening linkers. For example, U.S. Pat. No. 5,612,460, the entire disclosure of which is incorporated herein by reference, discloses urethane linkers for connecting polyethylene glycol to proteins. Protein-polyethylene glycol conjugates wherein the polyethylene glycol is attached to the protein by a linker can also be produced by reaction of proteins with compounds such as MPEG-succinimidylsuccinate, MPEG activated with 1,1′-carbonyldiimidazole, MPEG-2,4,5-trichloropenylcarbonate, MPEG-p-nitrophenolcarbonate, and various MPEG-succinate derivatives. A number of additional polyethylene glycol derivatives and reaction chemistries for attaching polyethylene glycol to proteins are described in International Publication No. WO 98/32466, the entire disclosure of which is incorporated herein by reference. Pegylated protein products produced using the reaction chemistries set out herein are included within the scope of the invention.

[0197] The number of polyethylene glycol moieties attached to each protein of the invention (i.e., the degree of substitution) may also vary. For example, the pegylated proteins of the invention may be linked, on average, to 1, 2, 3, 4, 5, 6, 7, 8, 9, 10, 12, 15, 17, 20, or more polyethylene glycol molecules. Similarly, the average degree of substitution within ranges such as 1-3, 2-4, 3-5, 4-6, 5-7, 6-8, 7-9, 8-10, 9-11, 10-12, 11-13, 12-14, 13-15, 14-16, 15-17, 16-18, 17-19, or 18-20 polyethylene glycol moieties per protein molecule. Methods for determining the degree of substitution are discussed, for example, in Delgado et al., Crit. Rev. Thera. Drug Carrier Sys. 9:249-304 (1992).

[0198] The polypeptides of the invention can be recovered and purified from chemical synthesis and recombinant cell cultures by standard methods which include, but are not limited to, ammonium sulfate or ethanol precipitation, acid extraction, anion or cation exchange chromatography, phosphocellulose chromatography, hydrophobic interaction chromatography, affinity chromatography, hydroxylapatite chromatography and lectin chromatography. Most preferably, high performance liquid chromatography (“HPLC”) is employed for purification. Well known techniques for refolding protein may be employed to regenerate active conformation when the polypeptide is denatured during isolation and/or purification.

[0199] The polypeptides of the invention may be in monomers or multimers (i.e., dimers, trimers, tetramers and higher multimers). Accordingly, the present invention relates to monomers and multimers of the polypeptides of the invention, their preparation, and compositions (preferably, Therapeutics) containing them. In specific embodiments, the polypeptides of the invention are monomers, dimers, trimers or tetramers. In additional embodiments, the multimers of the invention are at least dimers, at least trimers, or at least tetramers.

[0200] Multimers encompassed by the invention may be homomers or heteromers. As used herein, the term homomer refers to a multimer containing only polypeptides corresponding to a protein of the invention (e.g., the amino acid sequence of SEQ ID NO:Y, an amino acid sequence encoded by SEQ ID NO:X or the complement of SEQ ID NO:X, the amino acid sequence encoded by the portion of SEQ ID NO:X as defined in columns 8 and 9 of Table 2, and/or an amino acid sequence encoded by cDNA contained in Clone ID NO:Z (including fragments, variants, splice variants, and fusion proteins, corresponding to these as described herein)). These homomers may contain polypeptides having identical or different amino acid sequences. In a specific embodiment, a homomer of the invention is a multimer containing only polypeptides having an identical amino acid sequence. In another specific embodiment, a homomer of the invention is a multimer containing polypeptides having different amino acid sequences. In specific embodiments, the multimer of the invention is a homodimer (e.g., containing two polypeptides having identical or different amino acid sequences) or a homotrimer (e.g., containing three polypeptides having identical and/or different amino acid sequences). In additional embodiments, the homomeric multimer of the invention is at least a homodimer, at least a homotrimer, or at least a homotetramer.

[0201] As used herein, the term heteromer refers to a multimer containing one or more heterologous polypeptides (i.e., polypeptides of different proteins) in addition to the polypeptides of the invention. In a specific embodiment, the multimer of the invention is a heterodimer, a heterotrimer, or a heterotetramer. In additional embodiments, the heteromeric multimer of the invention is at least a heterodimer, at least a heterotrimer, or at least a heterotetramer.

[0202] Multimers of the invention may be the result of hydrophobic, hydrophilic, ionic and/or covalent associations and/or may be indirectly linked by, for example, liposome formation. Thus, in one embodiment, multimers of the invention, such as, for example, homodimers or homotrimers, are formed when polypeptides of the invention contact one another in solution. In another embodiment, heteromultimers of the invention, such as, for example, heterotrimers or heterotetramers, are formed when polypeptides of the invention contact antibodies to the polypeptides of the invention (including antibodies to the heterologous polypeptide sequence in a fusion protein of the invention) in solution. In other embodiments, multimers of the invention are formed by covalent associations with and/or between the polypeptides of the invention. Such covalent associations may involve one or more amino acid residues contained in the polypeptide sequence (e.g., that recited in SEQ ID NO:Y, encoded by the portion of SEQ ID NO:X as defined in columns 8 and 9 of Table 2, and/or encoded by the cDNA contained in Clone ID NO:Z). In one instance, the covalent associations are cross-linking between cysteine residues located within the polypeptide sequences which interact in the native (i.e., naturally occurring) polypeptide. In another instance, the covalent associations are the consequence of chemical or recombinant manipulation. Alternatively, such covalent associations may involve one or more amino acid residues contained in the heterologous polypeptide sequence in a fusion protein. In one example, covalent associations are between the heterologous sequence contained in a fusion protein of the invention (see, e.g., U.S. Pat. No. 5,478,925). In a specific example, the covalent associations are between the heterologous sequence contained in a Fc fusion protein of the invention (as described herein). In another specific example, covalent associations of fusion proteins of the invention are between heterologous polypeptide sequence from another protein that is capable of forming covalently associated multimers, such as for example, osteoprotegerin (see, e.g., International Publication NO: WO 98/49305, the contents of which are herein incorporated by reference in its entirety). In another embodiment, two or more polypeptides of the invention are joined through peptide linkers. Examples include those peptide linkers described in U.S. Pat. No. 5,073,627 (hereby incorporated by reference). Proteins comprising multiple polypeptides of the invention separated by peptide linkers may be produced using conventional recombinant DNA technology.

[0203] Another method for preparing multimer polypeptides of the invention involves use of polypeptides of the invention fused to a leucine zipper or isoleucine zipper polypeptide sequence. Leucine zipper and isoleucine zipper domains are polypeptides that promote multimerization of the proteins in which they are found. Leucine zippers were originally identified in several DNA-binding proteins (Landschulz et al., Science 240:1759, (1988)), and have since been found in a variety of different proteins. Among the known leucine zippers are naturally occurring peptides and derivatives thereof that dimerize or trimerize. Examples of leucine zipper domains suitable for producing soluble multimeric proteins of the invention are those described in PCT application WO 94/10308, hereby incorporated by reference. Recombinant fusion proteins comprising a polypeptide of the invention fused to a polypeptide sequence that dimerizes or trimerizes in solution are expressed in suitable host cells, and the resulting soluble multimeric fusion protein is recovered from the culture supernatant using techniques known in the art.

[0204] Trimeric polypeptides of the invention may offer the advantage of enhanced biological activity. Preferred leucine zipper moieties and isoleucine moieties are those that preferentially form trimers. One example is a leucine zipper derived from lung surfactant protein D (SPD) as described in Hoppe et al. (FEBS Letters 344:191, (1994)) and in U.S. patent application Ser. No. 08/446,922, hereby incorporated by reference. Other peptides derived from naturally occurring trimeric proteins may be employed in preparing trimeric polypeptides of the invention.

[0205] In another example, proteins of the invention are associated by interactions between Flag® polypeptide sequence contained in fusion proteins of the invention containing Flag® polypeptide sequence. In a further embodiment, proteins of the invention are associated by interactions between heterologous polypeptide sequence contained in Flag® fusion proteins of the invention and anti-Flag® antibody.

[0206] The multimers of the invention may be generated using chemical techniques known in the art. For example, polypeptides desired to be contained in the multimers of the invention may be chemically cross-linked using linker molecules and linker molecule length optimization techniques known in the art (see, e.g., U.S. Pat. No. 5,478,925, which is herein incorporated by reference in its entirety). Additionally, multimers of the invention may be generated using techniques known in the art to form one or more inter-molecule cross-links between the cysteine residues located within the sequence of the polypeptides desired to be contained in the multimer (see, e.g., U.S. Pat. No. 5,478,925, which is herein incorporated by reference in its entirety). Further, polypeptides of the invention may be routinely modified by the addition of cysteine or biotin to the C-terminus or N-terminus of the polypeptide and techniques known in the art may be applied to generate multimers containing one or more of these modified polypeptides (see, e.g., U.S. Pat. No. 5,478,925, which is herein incorporated by reference in its entirety). Additionally, techniques known in the art may be applied to generate liposomes containing the polypeptide components desired to be contained in the multimer of the invention (see, e.g., U.S. Pat. No. 5,478,925, which is herein incorporated by reference in its entirety).

[0207] Alternatively, multimers of the invention may be generated using genetic engineering techniques known in the art. In one embodiment, polypeptides contained in multimers of the invention are produced recombinantly using fusion protein technology described herein or otherwise known in the art (see, e.g., U.S. Pat. No. 5,478,925, which is herein incorporated by reference in its entirety). In a specific embodiment, polynucleotides coding for a homodimer of the invention are generated by ligating a polynucleotide sequence encoding a polypeptide of the invention to a sequence encoding a linker polypeptide and then further to a synthetic polynucleotide encoding the translated product of the polypeptide in the reverse orientation from the original C-terminus to the N-terminus (lacking the leader sequence) (see, e.g., U.S. Pat. No. 5,478,925, which is herein incorporated by reference in its entirety). In another embodiment, recombinant techniques described herein or otherwise known in the art are applied to generate recombinant polypeptides of the invention which contain a transmembrane domain (or hydrophobic or signal peptide) and which can be incorporated by membrane reconstitution techniques into liposomes (see, e.g., U.S. Pat. No. 5,478,925, which is herein incorporated by reference in its entirety).

### Antibodies

[0208] Further polypeptides of the invention relate to antibodies and T-cell antigen receptors (TCR) which immunospecifically bind a polypeptide, polypeptide fragment, or variant of the invention (e.g., a polypeptide or fragment or variant of the amino acid sequence of SEQ ID NO:Y or a polypeptide encoded by the cDNA contained in Clone ID No:Z, and/or an epitope, of the present invention) as determined by immunoassays well known in the art for assaying specific antibody-antigen binding. Antibodies of the invention include, but are not limited to, polyclonal, monoclonal, multispecific, human, humanized or chimeric antibodies, single chain antibodies, Fab fragments, F(ab′) fragments, fragments produced by a Fab expression library, anti-idiotypic (anti-Id) antibodies (including, e.g., anti-Id antibodies to antibodies of the invention), intracellularly-made antibodies (i.e., intrabodies), and epitope-binding fragments of any of the above. The term “antibody,” as used herein, refers to immunoglobulin molecules and immunologically active portions of immunoglobulin molecules, i.e., molecules that contain an antigen binding site that immunospecifically binds an antigen. The immunoglobulin molecules of the invention can be of any type (e.g., IgG, IgE, IgM, IgD, IgA and IgY), class (e.g., IgG1, IgG2, IgG3, IgG4, IgA1 and IgA2) or subclass of immunoglobulin molecule. In preferred embodiments, the immunoglobulin molecules of the invention are IgG1. In other preferred embodiments, the immunoglobulin molecules of the invention are IgG4.

[0209] Most preferably the antibodies are human antigen-binding antibody fragments of the present invention and include, but are not limited to, Fab, Fab′ and F(ab′)2, Fd, single-chain Fvs (scFv), single-chain antibodies, disulfide-linked Fvs (sdFv) and fragments comprising either a VL or VH domain. Antigen-binding antibody fragments, including single-chain antibodies, may comprise the variable region(s) alone or in combination with the entirety or a portion of the following: hinge region, CH1, CH2, and CH3 domains. Also included in the invention are antigen-binding fragments also comprising any combination of variable region(s) with a hinge region, CH1, CH2, and CH3 domains. The antibodies of the invention may be from any animal origin including birds and mammals. Preferably, the antibodies are human, murine (e.g., mouse and rat), donkey, ship rabbit, goat, guinea pig, camel, horse, or chicken. As used herein, “human” antibodies include antibodies having the amino acid sequence of a human immunoglobulin and include antibodies isolated from human immunoglobulin libraries or from animals transgenic for one or more human immunoglobulin and that do not express endogenous immunoglobulins, as described infra and, for example in, U.S. Pat. No. 5,939,598 by Kucherlapati et al.

[0210] The antibodies of the present invention may be monospecific, bispecific, trispecific or of greater multispecificity. Multispecific antibodies may be specific for different epitopes of a polypeptide of the present invention or may be specific for both a polypeptide of the present invention as well as for a heterologous epitope, such as a heterologous polypeptide or solid support material. See, e.g., PCT publications WO 93/17715; WO 92/08802; WO 91/00360; WO 92/05793; Tutt, et al., J. Immunol. 147:60-69 (1991); U.S. Pat. Nos. 4,474,893; 4,714,681; 4,925,648; 5,573,920; 5,601,819; Kostelny et al., J. Immunol. 148:1547-1553 (1992).

[0211] Antibodies of the present invention may be described or specified in terms of the epitope(s) or portion(s) of a polypeptide of the present invention which they recognize or specifically bind. The epitope(s) or polypeptide portion(s) may be specified as described herein, e.g., by N-terminal and C-terminal positions, or by size in contiguous amino acid residues, or listed in the Tables and Figures. Preferred epitopes of the invention include the predicted epitopes shown in column 7 of Table 1A, as well as polynucleotides that encode these epitopes. Antibodies which specifically bind any epitope or polypeptide of the present invention may also be excluded. Therefore, the present invention includes antibodies that specifically bind polypeptides of the present invention, and allows for the exclusion of the same.

[0212] Antibodies of the present invention may also be described or specified in terms of their cross-reactivity. Antibodies that do not bind any other analog, ortholog, or homolog of a polypeptide of the present invention are included. Antibodies that bind polypeptides with at least 95%, at least 90%, at least 85%, at least 80%, at least 75%, at least 70%, at least 65%, at least 60%, at least 55%, and at least 50% identity (as calculated using methods known in the art and described herein) to a polypeptide of the present invention are also included in the present invention. In specific embodiments, antibodies of the present invention cross-react with murine, rat and/or rabbit homologs of human proteins and the corresponding epitopes thereof. Antibodies that do not bind polypeptides with less than 95%, less than 90%, less than 85%, less than 80%, less than 75%, less than 70%, less than 65%, less than 60%, less than 55%, and less than 50% identity (as calculated using methods known in the art and described herein) to a polypeptide of the present invention are also included in the present invention. In a specific embodiment, the above-described cross-reactivity is with respect to any single specific antigenic or immunogenic polypeptide, or combination(s) of 2, 3, 4, 5, or more of the specific antigenic and/or immunogenic polypeptides disclosed herein. Further included in the present invention are antibodies which bind polypeptides encoded by polynucleotides which hybridize to a polynucleotide of the present invention under stringent hybridization conditions (as described herein). Antibodies of the present invention may also be described or specified in terms of their binding affinity to a polypeptide of the invention. Preferred binding affinities include those with a dissociation constant or Kd less than 5×10⁻² M, 10⁻² M, 5×10⁻³ M, 10⁻³ M, 5×10⁻⁴ M, 10⁻⁴ M, 5×10⁻⁵ M, 10⁻⁵ M, 5×10⁻⁶ M, 10⁻⁴M, 5×10⁻⁷M, 10⁷ M, 5×10⁻⁸ M, 10⁻⁸ M, 5×10⁻⁹ M, 10⁻⁹ M, 5×10⁻¹⁰ M, 10⁻¹⁰ M, 5×10⁻¹¹ M, 10⁻¹¹ M, 5×10⁻¹² M, 10⁻¹² M, 5×10⁻¹³ M, 10⁻¹³ M, 5×10⁻¹⁴ M, 10⁻¹⁴ M, 5×10⁻¹⁵ M, or 10⁻¹⁵ M.

[0213] The invention also provides antibodies that competitively inhibit binding of an antibody to an epitope of the invention as determined by any method known in the art for determining competitive binding, for example, the immunoassays described herein. In preferred embodiments, the antibody competitively inhibits binding to the epitope by at least 95%, at least 90%, at least 85%, at least 80%, at least 75%, at least 70%, at least 60%, or at least 50%.

[0214] Antibodies of the present invention may act as agonists or antagonists of the polypeptides of the present invention. For example, the present invention includes antibodies which disrupt the receptor/ligand interactions with the polypeptides of the invention either partially or fully. Preferably, antibodies of the present invention bind an antigenic epitope disclosed herein, or a portion thereof. The invention features both receptor-specific antibodies and ligand-specific antibodies. The invention also features receptor-specific antibodies which do not prevent ligand binding but prevent receptor activation. Receptor activation (i.e., signaling) may be determined by techniques described herein or otherwise known in the art. For example, receptor activation can be determined by detecting the phosphorylation (e.g., tyrosine or serine/threonine) of the receptor or its substrate by immunoprecipitation followed by western blot analysis (for example, as described supra). In specific embodiments, antibodies are provided that inhibit ligand activity or receptor activity by at least 95%, at least 90%, at least 85%, at least 80%, at least 75%, at least 70%, at least 60%, or at least 50% of the activity in absence of the antibody.

[0215] The invention also features receptor-specific antibodies which both prevent ligand binding and receptor activation as well as antibodies that recognize the receptor-ligand complex, and, preferably, do not specifically recognize the unbound receptor or the unbound ligand. Likewise, included in the invention are neutralizing antibodies which bind the ligand and prevent binding of the ligand to the receptor, as well as antibodies which bind the ligand, thereby preventing receptor activation, but do not prevent the ligand from binding the receptor. Further included in the invention are antibodies which activate the receptor. These antibodies may act as receptor agonists, i.e., potentiate or activate either all or a subset of the biological activities of the ligand-mediated receptor activation, for example, by inducing dimerization of the receptor. The antibodies may be specified as agonists, antagonists or inverse agonists for biological activities comprising the specific biological activities of the peptides of the invention disclosed herein. The above antibody agonists can be made using methods known in the art. See, e.g., PCT publication WO 96/40281; U.S. Pat. No. 5,811,097; Deng et al., Blood 92(6):1981-1988 (1998); Chen et al., Cancer Res. 58(16):3668-3678 (1998); Harrop et al., J. Immunol. 161(4):1786-1794 (1998); Zhu et Cancer Res. 58(15):3209-3214 (1998); Yoon et al., J. Immunol. 160(7):3170-3179 (1998); Prat et al., J. Cell. Sci. 111(Pt2):237-247 (1998); Pitard et al., J. Immunol. Methods 205(2):177-190 (1997); Liautard et al., Cytokine 9(4):233-241 (1997); Carlson et al., J. Biol. Chem. 272(17):11295-11301 (1997); Taryman et al., Neuron 14(4):755-762 (1995); Muller et al., Structure 6(9):1153-1167 (1998); Bartunek et al., Cytokine 8(1):14-20 (1996) (which are all incorporated by reference herein in their entireties).

[0216] Antibodies of the present invention may be used, for example, to purify, detect, and target the polypeptides of the present invention, including both in vitro and in vivo diagnostic and therapeutic methods. For example, the antibodies have utility in immunoassays for qualitatively and quantitatively measuring levels of the polypeptides of the present invention in biological samples. See, e.g., Harlow et al., Antibodies: A Laboratory Manual, (Cold Spring Harbor Laboratory Press, 2nd ed. 1988); incorporated by reference herein in its entirety.

[0217] As discussed in more detail below, the antibodies of the present invention may be used either alone or in combination with other compositions. The antibodies may further be recombinantly fused to a heterologous polypeptide at the N- or C-terminus or chemically conjugated (including covalent and non-covalent conjugations) to polypeptides or other compositions. For example, antibodies of the present invention may be recombinantly fused or conjugated to molecules useful as labels in detection assays and effector molecules such as heterologous polypeptides, drugs, radionuclides, or toxins. See, e.g., PCT publications WO 92/08495; WO 91/14438; WO 89/12624; U.S. Pat. No. 5,314,995; and EP 396,387; the disclosures of which are incorporated herein by reference in their entireties.

[0218] The antibodies of the invention include derivatives that are modified, i.e, by the covalent attachment of any type of molecule to the antibody such that covalent attachment does not prevent the antibody from generating an anti-idiotypic response. For example, but not by way of limitation, the antibody derivatives include antibodies that have been modified, e.g., by glycosylation, acetylation, pegylation, phosphylation, amidation, derivatization by known protecting/blocking groups, proteolytic cleavage, linkage to a cellular ligand or other protein, etc. Any of numerous chemical modifications may be carried out by known techniques, including, but not limited to specific chemical cleavage, acetylation, formylation, metabolic synthesis of tunicamycin, etc. Additionally, the derivative may contain one or more non-classical amino acids.

[0219] The antibodies of the present invention may be generated by any suitable method known in the art. Polyclonal antibodies to an antigen-of- interest can be produced by various procedures well known in the art. For example, a polypeptide of the invention can be administered to various host animals including, but not limited to, rabbits, mice, rats, etc. to induce the production of sera containing polyclonal antibodies specific for the antigen. Various adjuvants may be used to increase the immunological response, depending on the host species, and include but are not limited to, Freund's (complete and incomplete), mineral gels such as aluminum hydroxide, surface active substances such as lysolecithin, pluronic polyols, polyanions, peptides, oil emulsions, keyhole limpet hemocyanins, dinitrophenol, and potentially useful human adjuvants such as BCG (bacille Calmette-Guerin) and corynebacterium parvum. Such adjuvants are also well known in the art.

[0220] Monoclonal antibodies can be prepared using a wide variety of techniques known in the art including the use of hybridoma, recombinant, and phage display technologies, or a combination thereof. For example, monoclonal antibodies can be produced using hybridoma techniques including those known in the art and taught, for example, in Harlow et al., Antibodies: A Laboratory Manual, (Cold Spring Harbor Laboratory Press, 2nd ed. 1988); Hammerling, et al., in: Monoclonal Antibodies and T-Cell Hybridomas 563-681 (Elsevier, N.Y., 1981) (said references incorporated by reference in their entireties). The term “monoclonal antibody” as used herein is not limited to antibodies produced through hybridoma technology. The term “monoclonal antibody” refers to an antibody that is derived from a single clone, including any eukaryotic, prokaryotic, or phage clone, and not the method by which it is produced.

[0221] Methods for producing and screening for specific antibodies using hybridoma technology are routine and well known in the art and are discussed in detail in the Examples. In a non-limiting example, mice can be immunized with a polypeptide of the invention or a cell expressing such peptide. Once an immune response is detected, e.g., antibodies specific for the antigen are detected in the mouse serum, the mouse spleen is harvested and splenocytes isolated. The splenocytes are then fused by well known techniques to any suitable myeloma cells, for example cells from cell line SP20 available from the ATCC. Hybridomas are selected and cloned by limited dilution. The hybridoma clones are then assayed by methods known in the art for cells that secrete antibodies capable of binding a polypeptide of the invention. Ascites fluid, which generally contains high levels of antibodies, can be generated by immunizing mice with positive hybridoma clones.

[0222] Accordingly, the present invention provides methods of generating monoclonal antibodies as well as antibodies produced by the method comprising culturing a hybridoma cell secreting an antibody of the invention wherein, preferably, the hybridoma is generated by fusing splenocytes isolated from a mouse immunized with an antigen of the invention with myeloma cells and then screening the hybridomas resulting from the fusion for hybridoma clones that secrete an antibody able to bind a polypeptide of the invention.

[0223] Another well known method for producing both polyclonal and monoclonal human B cell lines is transformation using Epstein Barr Virus (EBV). Protocols for generating EBV-transformed B cell lines are commonly known in the art, such as, for example, the protocol outlined in Chapter 7.22 of Current Protocols in Immunology, Coligan et al., Eds., 1994, John Wiley & Sons, NY, which is hereby incorporated in its entirety by reference. The source of B cells for transformation is commonly human peripheral blood, but B cells for transformation may also be derived from other sources including, but not limited to, lymph nodes, tonsil, spleen, tumor tissue, and infected tissues. Tissues are generally made into single cell suspensions prior to EBV transformation. Additionally, steps may be taken to either physically remove or inactivate T cells (e.g., by treatment with cyclosporin A) in B cell-containing samples, because T cells from individuals seropositive for anti-EBV antibodies can suppress B cell immortalization by EBV.

[0224] In general, the sample containing human B cells is innoculated with EBV, and cultured for 3-4 weeks. A typical source of EBV is the culture supernatant of the B95-8 cell line (ATCC #VR-1492). Physical signs of EBV transformation can generally be seen towards the end of the 3-4 week culture period. By phase-contrast microscopy, transformed cells may appear large, clear, hairy and tend to aggregate in tight clusters of cells. Initially, EBV lines are generally polyclonal. However, over prolonged periods of cell cultures, EBV lines may become monoclonal or polyclonal as a result of the selective outgrowth of particular B cell clones. Alternatively, polyclonal EBV transformed lines may be subcloned (e.g., by limiting dilution culture) or fused with a suitable fusion partner and plated at limiting dilution to obtain monoclonal B cell lines. Suitable fusion partners for EBV transformed cell lines include mouse myeloma cell lines (e.g., SP2/0, X63-Ag8.653), heteromyeloma cell lines (human x mouse; e.g. SPAM-8, SBC-H20, and CB-F7), and human cell lines (e.g., GM 1500, SKO-007, RPMI 8226, and KR-4). Thus, the present invention also provides a method of generating polyclonal or monoclonal human antibodies against polypeptides of the invention or fragments thereof, comprising EBV-transformation of human B cells.

[0225] Antibody fragments which recognize specific epitopes may be generated by known techniques. For example, Fab and F(ab′)2 fragments of the invention may be produced by proteolytic cleavage of immunoglobulin molecules, using enzymes such as papain (to produce Fab fragments) or pepsin (to produce F(ab′)2 fragments). F(ab′)2 fragments contain the variable region, the light chain constant region and the CH1 domain of the heavy chain.

[0226] For example, the antibodies of the present invention can also be generated using various phage display methods known in the art. In phage display methods, functional antibody domains are displayed on the surface of phage particles which carry the polynucleotide sequences encoding them. in a particular embodiment, such phage can be utilized to display antigen binding domains expressed from a repertoire or combinatorial antibody library (e.g., human or murine). Phage expressing an antigen binding domain that binds the antigen of interest can be selected or identified with antigen, e.g., using labeled antigen or antigen bound or captured to a solid surface or bead. Phage used in these methods are typically filamentous phage including fd and M13 binding domains expressed from phage with Fab, Fv or disulfide stabilized Fv antibody domains recombinantly fused to either the phage gene III or gene VIII protein. Examples of phage display methods that can be used to make the antibodies of the present invention include those disclosed in Brinkman et al., J. Immunol. Methods 182:41-50 (1995); Ames et al., J. Immunol. Methods 184:177-186 (1995); Kettleborough et al., Eur. J. Immunol. 24:952-958 (1994); Persic et al., Gene 187 9-18 (1997); Burton et al., Advances in Immunology 57:191-280 (1994); PCT application No. PCT/GB91/01134; PCT publications WO 90/02809; WO 91/10737; WO 92/01047; WO 92/18619; WO 93/11236; WO 95/15982; WO 95/20401; and U.S. Pat. Nos. 5,698,426; 5,223,409; 5,403,484; 5,580,717; 5,427,908; 5,750,753; 5,821,047; 5,571,698; 5,427,908; 5,516,637; 5,780,225; 5,658,727; 5,733,743 and 5,969,108; each of which is incorporated herein by reference in its entirety.

[0227] As described in the above references, after phage selection, the antibody coding regions from the phage can be isolated and used to generate whole antibodies, including human antibodies, or any other desired antigen binding fragment, and expressed in any desired host, including mammalian cells, insect cells, plant cells, yeast, and bacteria, e.g., as described in detail below. For example, techniques to recombinantly produce Fab, Fab′ and F(ab′)2 fragments can also be employed using methods known in the art such as those disclosed in PCT publication WO 92/22324; Mullinax et al., BioTechniques 12(6):864-869 (1992); and Sawai et al., AJRI 34:26-34 (1995); and Better et al., Science 240:1041-1043 (1988) (said references incorporated by reference in their entireties).

[0228] Examples of techniques which can be used to produce single-chain Fvs and antibodies include those described in U.S. Pat. Nos. 4,946,778 and 5,258,498; Huston et al., Methods in Enzymology 203:46-88 (1991); Shu et al., PNAS 90:7995-7999 (1993); and Skerra et al., Science 240:1038-1040 (1988). For some uses, including in vivo use of antibodies in humans and in vitro detection assays, it may be preferable to use chimeric, humanized, or human antibodies. A chimeric antibody is a molecule in which different portions of the antibody are derived from different animal species, such as antibodies having a variable region derived from a murine monoclonal antibody and a human immunoglobulin constant region. Methods for producing chimeric antibodies are known in the art. See e.g., Morrison, Science 229:1202 (1985); Oi et al., BioTechniques 4:214 (1986); Gillies et al., (1989) J. Immunol. Methods 125:191-202; U.S. Pat. Nos. 5,807,715; 4,816,567; and 4,816397, which are incorporated herein by reference in their entirety. Humanized antibodies are antibody molecules from non-human species antibody that binds the desired antigen having one or more complementarity determining regions (CDRs) from the non-human species and a framework regions from a human immunoglobulin molecule. Often, framework residues in the human framework regions will be substituted with the corresponding residue from the CDR donor antibody to alter, preferably improve, antigen binding. These framework substitutions are identified by methods well known in the art, e.g., by modeling of the interactions of the CDR and framework residues to identify framework residues important for antigen binding and sequence comparison to identify unusual framework residues at particular positions. (See, e.g., Queen et al., U.S. Pat. No. 5,585,089; Riechmann et al., Nature 332:323 (1988), which are incorporated herein by reference in their entireties.) Antibodies can be humanized using a variety of techniques known in the art including, for example, CDR-grafting (EP 239,400; PCT publication WO 91/09967; U.S. Pat. Nos. 5,225,539; 5,530,101; and 5,585,089), veneering or resurfacing (EP 592,106; EP 519,596; Padlan, Molecular Immunology 28(4/5):489-498 (1991); Studnicka et al., Protein Engineering 7(6):805-814 (1994); Roguska. et al., PNAS 91:969-973 (1994)), and chain shuffling (U.S. Pat. No. 5,565,332).

[0229] Completely human antibodies are particularly desirable for therapeutic treatment of human patients. Human antibodies can be made by a variety of methods known in the art including phage display methods described above using antibody libraries derived from human immunoglobulin sequences. See also, U.S. Pat. Nos. 4,444,887 and 4,716,111; and PCT publications WO 98/46645, WO 98/50433, WO 98/24893, WO 98/16654, WO 96/34096, WO 96/33735, and WO 91/10741; each of which is incorporated herein by reference in its entirety.

[0230] Human antibodies can also be produced using transgenic mice which are incapable of expressing functional endogenous immunoglobulins, but which can express human immunoglobulin genes. For example, the human heavy and light chain immunoglobulin gene complexes may be introduced randomly or by homologous recombination into mouse embryonic stem cells. Alternatively, the human variable region, constant region, and diversity region may be introduced into mouse embryonic stem cells in addition to the human heavy and light chain genes. The mouse heavy and light chain immunoglobulin genes may be rendered non-functional separately or simultaneously with the introduction of human immunoglobulin loci by homologous recombination. In particular, homozygous deletion of the JH region prevents endogenous antibody production. The modified embryonic stem cells are expanded and microinjected into blastocysts to produce chimeric mice. The chimeric mice are then bred to produce homozygous offspring which express human antibodies. The transgenic mice are immunized in the normal fashion with a selected antigen, e.g., all or a portion of a polypeptide of the invention. Monoclonal antibodies directed against the antigen can be obtained from the immunized, transgenic mice using conventional hybridoma technology. The human immunoglobulin transgenes harbored by the transgenic mice rearrange during B cell differentiation, and subsequently undergo class switching and somatic mutation. Thus, using such a technique, it is possible to produce therapeutically useful IgG, IgA, IgM and IgE antibodies. For an overview of this technology for producing human antibodies, see Lonberg and Huszar, Int. Rev. Immunol. 13:65-93 (1995). For a detailed discussion of this technology for producing human antibodies and human monoclonal antibodies and protocols for producing such antibodies, see, e.g., PCT publications WO 98/24893; WO 92/01047; WO 96/34096; WO 96/33735; European Patent No. 0 598 877; U.S. Pat. Nos. 5,413,923; 5,625,126; 5,633,425; 5,569,825; 5,661,016; 5,545,806; 5,814,318; 5,885,793; 5,916,771; 5,939,598; 6,075,181; and 6,114,598, which are incorporated by reference herein in their entirety. In addition, companies such as Abgenix, Inc. (Freemont, Calif.) and Genpharm (San Jose, Calif.) can be engaged to provide human antibodies directed against a selected antigen using technology similar to that described above.

[0231] Completely human antibodies which recognize a selected epitope can be generated using a technique referred to as “guided selection.” In this approach a selected non-human monoclonal antibody, e.g., a mouse antibody, is used to guide the selection of a completely human antibody recognizing the same epitope. (Jespers et al., Bio/technology 12:899-903 (1988)).

[0232] Further, antibodies to the polypeptides of the invention can, in turn, be utilized to generate anti-idiotype antibodies that “mimic” polypeptides of the invention using techniques well known to those skilled in the art. (See, e.g., Greenspan & Bona, FASEB J. 7(5):437-444; (1989) and Nissinoff, J. Immunol. 147(8):2429-2438 (1991)). For example, antibodies which bind to and competitively inhibit polypeptide multimerization and/or binding of a polypeptide of the invention to a ligand can be used to generate anti-idiotypes that “mimic” the polypeptide multimerization and/or binding domain and, as a consequence, bind to and neutralize polypeptide and/or its ligand. Such neutralizing anti-idiotypes or Fab fragments of such anti-idiotypes can be used in therapeutic regimens to neutralize polypeptide ligand(s)/receptor(s). For example, such anti-idiotypic antibodies can be used to bind a polypeptide of the invention and/or to bind its ligand(s)/receptor(s), and thereby block its biological activity. Alternatively, antibodies which bind to and enhance polypeptide multimerization and/or binding, and/or receptor/ligand multimerization, binding and/or signaling can be used to generate anti-idiotypes that function as agonists of a polypeptide of the invention and/or its ligand/receptor. Such agonistic anti-idiotypes or Fab fragments of such anti-idiotypes can be used in therapeutic regimens as agonists of the polypeptides of the invention or its ligand(s)/receptor(s). For example, such anti-idiotypic antibodies can be used to bind a polypeptide of the invention and/or to bind its ligand(s)/receptor(s), and thereby promote or enhance its biological activity.

[0233] Intrabodies of the invention can be produced using methods known in the art, such as those disclosed and reviewed in Chen et al., Hum. Gene Ther. 5:595-601 (1994); Marasco, W. A., Gene Ther. 4:11-15 (1997); Rondon and Marasco, Annu. Rev. Microbiol. 51:257-283 (1997); Proba et al., J. Mol. Biol. 275:245-253 (1998); Cohen et al., Oncogene 17:2445-2456 (1998); Ohage and Steipe, J. Mol. Biol. 291:1119-1128 (1999); Ohage et al., J. Mol. Biol. 291:1129-1134 (1999); Wirtz and Steipe, Protein Sci. 8:2245-2250 (1999); Zhu et al., J. Immunol. Methods 231:207-222 (1999); and references cited therein.

### Polynucleotides Encoding Antibodies

[0234] The invention further provides polynucleotides comprising a nucleotide sequence encoding an antibody of the invention and fragments thereof. The invention also encompasses polynucleotides that hybridize under stringent or alternatively, under lower stringency hybridization conditions, e.g., as defined supra, to polynucleotides that encode an antibody, preferably, that specifically binds to a polypeptide of the invention, preferably, an antibody that binds to a polypeptide having the amino acid sequence of SEQ ID NO:Y, to a polypeptide encoded by a portion of SEQ ID NO:X as defined in columns 8 and 9 of Table 2, and/or to a polypeptide encoded by the cDNA contained in Clone ID NO:Z.

[0235] The polynucleotides may be obtained, and the nucleotide sequence of the polynucleotides determined, by any method known in the art. For example, if the nucleotide sequence of the antibody is known, a polynucleotide encoding the antibody may be assembled from chemically synthesized oligonucleotides (e.g., as described in Kutmeier et al., BioTechniques 17:242 (1994)), which, briefly, involves the synthesis of overlapping oligonucleotides containing portions of the sequence encoding the antibody, annealing and ligating of those oligonucleotides, and then amplification of the ligated oligonucleotides by PCR.

[0236] Alternatively, a polynucleotide encoding an antibody may be generated from nucleic acid from a suitable source. If a clone containing a nucleic acid encoding a particular antibody is not available, but the sequence of the antibody molecule is known, a nucleic acid encoding the immunoglobulin may be chemically synthesized or obtained from a suitable source (e.g., an antibody cDNA library, or a cDNA library generated from, or nucleic acid, preferably poly A+RNA, isolated from, any tissue or cells expressing the antibody, such as hybridoma cells selected to express an antibody of the invention) by PCR amplification using synthetic primers hybridizable to the 3′ and 5′ ends of the sequence or by cloning using an oligonucleotide probe specific for the particular gene sequence to identify, e.g., a cDNA clone from a cDNA library that encodes the antibody. Amplified nucleic acids generated by PCR may then be cloned into replicable cloning vectors using any method well known in the art.

[0237] Once the nucleotide sequence and corresponding amino acid sequence of the antibody is determined, the nucleotide sequence of the antibody may be manipulated using methods well known in the art for the manipulation of nucleotide sequences, e.g., recombinant DNA techniques, site directed mutagenesis, PCR, etc. (see, for example, the techniques described in Sambrook et al., 1990, Molecular Cloning, A Laboratory Manual, 2d Ed., Cold Spring Harbor Laboratory, Cold Spring Harbor, N.Y. and Ausubel et al., eds., 1998, Current Protocols in Molecular Biology, John Wiley & Sons, NY, which are both incorporated by reference herein in their entireties ), to generate antibodies having a different amino acid sequence, for example to create amino acid substitutions, deletions, and/or insertions.

[0238] In a specific embodiment, the amino acid sequence of the heavy and/or light chain variable domains may be inspected to identify the sequences of the complementarity determining regions (CDRs) by methods that are well know in the art, e.g., by comparison to known amino acid sequences of other heavy and light chain variable regions to determine the regions of sequence hypervariability. Using routine recombinant DNA techniques, one or more of the CDRs may be inserted within framework regions, e.g., into human framework regions to humanize a non-human antibody, as described supra. The framework regions may be naturally occurring or consensus framework regions, and preferably human framework regions (see, e.g., Chothia et al., J. Mol. Biol. 278: 457-479 (1998) for a listing of human framework regions). Preferably, the polynucleotide generated by the combination of the framework regions and CDRs encodes an antibody that specifically binds a polypeptide of the invention. Preferably, as discussed supra, one or more amino acid substitutions may be made within the framework regions, and, preferably, the amino acid substitutions improve binding of the antibody to its antigen. Additionally, such methods may be used to make amino acid substitutions or deletions of one or more variable region cysteine residues participating in an intrachain disulfide bond to generate antibody molecules lacking one or more intrachain disulfide bonds. Other alterations to the polynucleotide are encompassed by the present invention and within the skill of the art.

[0239] In addition, techniques developed for the production of “chimeric antibodies” (Morrison et al., Proc. Natl. Acad. Sci. 81:851-855 (1984); Neuberger et al., Nature 312:604-608 (1984); Takeda et al., Nature 314:452-454 (1985)) by splicing genes from a mouse antibody molecule of appropriate antigen specificity together with genes from a human antibody molecule of appropriate biological activity can be used. As described supra, a chimeric antibody is a molecule in which different portions are derived from different animal species, such as those having a variable region derived from a murine mAb and a human immunoglobulin constant region, e.g., humanized antibodies.

[0240] Alternatively, techniques described for the production of single chain antibodies (U.S. Pat. No. 4,946,778; Bird, Science 242:423-42 (1988); Huston et al., Proc. Natl. Acad. Sci. USA 85:5879-5883 (1988); and Ward et al., Nature 334:544-54 (1989)) can be adapted to produce single chain antibodies. Single chain antibodies are formed by linking the heavy and light chain fragments of the Fv region via an amino acid bridge, resulting in a single chain polypeptide. Techniques for the assembly of functional Fv fragments in E. coli may also be used (Skerra et al., Science 242:1038-1041 (1988)).

### Methods of Producing Antibodies

[0241] The antibodies of the invention can be produced by any method known in the art for the synthesis of antibodies, in particular, by chemical synthesis or preferably, by recombinant expression techniques. Methods of producing antibodies include, but are not limited to, hybridoma technology, EBV transformation, and other methods discussed herein as well as through the use recombinant DNA technology, as discussed below.

[0242] Recombinant expression of an antibody of the invention, or fragment, derivative or analog thereof, (e.g., a heavy or light chain of an antibody of the invention or a single chain antibody of the invention), requires construction of an expression vector containing a polynucleotide that encodes the antibody. Once a polynucleotide encoding an antibody molecule or a heavy or light chain of an antibody, or portion thereof (preferably containing the heavy or light chain variable domain), of the invention has been obtained, the vector for the production of the antibody molecule may be produced by recombinant DNA technology using techniques well known in the art. Thus, methods for preparing a protein by expressing a polynucleotide containing an antibody encoding nucleotide sequence are described herein. Methods which are well known to those skilled in the art can be used to construct expression vectors containing antibody coding sequences and appropriate transcriptional and translational control signals. These methods include, for example, in vitro recombinant DNA techniques, synthetic techniques, and in vivo genetic recombination. The invention, thus, provides replicable vectors comprising a nucleotide sequence encoding an antibody molecule of the invention, or a heavy or light chain thereof, or a heavy or light chain variable domain, operably linked to a promoter. Such vectors may include the nucleotide sequence encoding the constant region of the antibody molecule (see, e.g., PCT Publication WO 86/05807; PCT Publication WO 89/01036; and U.S. Pat. No. 5,122,464) and the variable domain of the antibody may be cloned into such a vector for expression of the entire heavy or light chain.

[0243] The expression vector is transferred to a host cell by conventional techniques and the transfected cells are then cultured by conventional techniques to produce an antibody of the invention. Thus, the invention includes host cells containing a polynucleotide encoding an antibody of the invention, or a heavy or light chain thereof, or a single chain antibody of the invention, operably linked to a heterologous promoter. In preferred embodiments for the expression of double-chained antibodies, vectors encoding both the heavy and light chains may be co-expressed in the host cell for expression of the entire immunoglobulin molecule, as detailed below.

[0244] A variety of host-expression vector systems may be utilized to express the antibody molecules of the invention. Such host-expression systems represent vehicles by which the coding sequences of interest may be produced and subsequently purified, but also represent cells which may, when transformed or transfected with the appropriate nucleotide coding sequences, express an antibody molecule of the invention in situ. These include but are not limited to microorganisms such as bacteria (e.g., E. coli, B. subtilis) transformed with recombinant bacteriophage DNA, plasmid DNA or cosmid DNA expression vectors containing antibody coding sequences; yeast (e.g., Saccharomyces, Pichia) transformed with recombinant yeast expression vectors containing antibody coding sequences; insect cell systems infected with recombinant virus expression vectors (e.g., baculovirus) containing antibody coding sequences; plant cell systems infected with recombinant virus expression vectors (e.g., cauliflower mosaic virus, CaMV; tobacco mosaic virus, TMV) or transformed with recombinant plasmid expression vectors (e.g., Ti plasmid) containing antibody coding sequences; or mammalian cell systems (e.g., COS, CHO, BHK, 293, 3T3 cells) harboring recombinant expression constructs containing promoters derived from the genome of mammalian cells (e.g., metallothionein promoter) or from mammalian viruses (e.g., the adenovirus late promoter; the vaccinia virus 7.5K promoter). Preferably, bacterial cells such as Escherichia coli, and more preferably, eukaryotic cells, especially for the expression of whole recombinant antibody molecule, are used for the expression of a recombinant antibody molecule. For example, mammalian cells such as Chinese hamster ovary cells (CHO), in conjunction with a vector such as the major intermediate early gene promoter element from human cytomegalovirus is an effective expression system for antibodies (Foecking et al., Gene 45:101 (1986); Cockett et al., Bio/Technology 8:2 (1990)).

[0245] In bacterial systems, a number of expression vectors may be advantageously selected depending upon the use intended for the antibody molecule being expressed. For example, when a large quantity of such a protein is to be produced, for the generation of pharmaceutical compositions of an antibody molecule, vectors which direct the expression of high levels of fusion protein products that are readily purified may be desirable. Such vectors include, but are not limited, to the E. coli expression vector pUR278 (Ruther et al., EMBO J. 2:1791 (1983)), in which the antibody coding sequence may be ligated individually into the vector in frame with the lac Z coding region so that a fusion protein is produced; pIN vectors (Inouye & Inouye, Nucleic Acids Res. 13:3101-3109 (1985); Van Heeke & Schuster, J. Biol. Chem. 24:5503-5509 (1989)); and the like. pGEX vectors may also be used to express foreign polypeptides as fusion proteins with glutathione S-transferase (GST). In general, such fusion proteins are soluble and can easily be purified from lysed cells by adsorption and binding to matrix glutathione-agarose beads followed by elution in the presence of free glutathione. The pGEX vectors are designed to include thrombin or factor Xa protease cleavage sites so that the cloned target gene product can be released from the GST moiety.

[0246] In an insect system, Autographa californica nuclear polyhedrosis virus (AcNPV) is used as a vector to express foreign genes. The virus grows in Spodoptera frugiperda cells. The antibody coding sequence may be cloned individually into non-essential regions (for example the polyhedrin gene) of the virus and placed under control of an AcNPV promoter (for example the polyhedrin promoter).

[0247] In mammalian host cells, a number of viral-based expression systems may be utilized. In cases where an adenovirus is used as an expression vector, the antibody coding sequence of interest may be ligated to an adenovirus transcription/translation control complex, e.g., the late promoter and tripartite leader sequence. This chimeric gene may then be inserted in the adenovirus genome by in vitro or in vivo recombination. Insertion in a non-essential region of the viral genome (e.g., region E1 or E3) will result in a recombinant virus that is viable and capable of expressing the antibody molecule in infected hosts. (e.g., see Logan & Shenk, Proc. Natl. Acad. Sci. USA 81:355-359 (1984)). Specific initiation signals may also be required for efficient translation of inserted antibody coding sequences. These signals include the ATG initiation codon and adjacent sequences. Furthermore, the initiation codon must be in phase with the reading frame of the desired coding sequence to ensure translation of the entire insert. These exogenous translational control signals and initiation codons can be of a variety of origins, both natural and synthetic. The efficiency of expression may be enhanced by the inclusion of appropriate transcription enhancer elements, transcription terminators, etc. (see Bittner et al., Methods in Enzymol. 153:51-544 (1987)).

[0248] In addition, a host cell strain may be chosen which modulates the expression of the inserted sequences, or modifies and processes the gene product in the specific fashion desired. Such modifications (e.g., glycosylation) and processing (e.g., cleavage) of protein products may be important for the function of the protein. Different host cells have characteristic and specific mechanisms for the post-translational processing and modification of proteins and gene products. Appropriate cell lines or host systems can be chosen to ensure the correct modification and processing of the foreign protein expressed. To this end, eukaryotic host cells which possess the cellular machinery for proper processing of the primary transcript, glycosylation, and phosphorylation of the gene product may be used. Such mammalian host cells include but are not limited to CHO, VERY, BHK, Hela, COS, MDCK, 293, 3T3, WI38, and in particular, breast cancer cell lines such as, for example, BT483, Hs578T, HTB2, BT20 and T47D, and normal mammary gland cell line such as, for example, CRL7030 and Hs578Bst.

[0249] For long-term, high-yield production of recombinant proteins, stable expression is preferred. For example, cell lines which stably express the antibody molecule may be engineered. Rather than using expression vectors which contain viral origins of replication, host cells can be transformed with DNA controlled by appropriate expression control elements (e.g., promoter, enhancer, sequences, transcription terminators, polyadenylation sites, etc.), and a selectable marker. Following the introduction of the foreign DNA, engineered cells may be allowed to grow for 1-2 days in an enriched media, and then are switched to a selective media. The selectable marker in the recombinant plasmid confers resistance to the selection and allows cells to stably integrate the plasmid into their chromosomes and grow to form foci which in turn can be cloned and expanded into cell lines. This method may advantageously be used to engineer cell lines which express the antibody molecule. Such engineered cell lines may be particularly useful in screening and evaluation of compounds that interact directly or indirectly with the antibody molecule.

[0250] A number of selection systems may be used, including but not limited to the herpes simplex virus thymidine kinase (Wigler et al., Cell 11:223 (1977)), hypoxanthine-guanine phosphoribosyltransferase (Szybalska & Szybalski, Proc. Natl. Acad. Sci. USA 48:202 (1992)), and adenine phosphoribosyltransferase (Lowy et al., Cell 22:817 (1980)) genes can be employed in tk-, hgprt- or aprt- cells, respectively. Also, antimetabolite resistance can be used as the basis of selection for the following genes: dhfr, which confers resistance to methotrexate (Wigler et al., Natl. Acad. Sci. USA 77:357 (1980); O'Hare et al., Proc. Natl. Acad. Sci. USA 78:1527 (1981)); gpt, which confers resistance to mycophenolic acid (Mulligan & Berg, Proc. Natl. Acad. Sci. USA 78:2072 (1981)); neo, which confers resistance to the aminoglycoside G-418 Clinical Pharmacy 12:488-505; Wu and Wu, Biotherapy 3:87-95 (1991); Tolstoshev, Ann. Rev. Pharmacol. Toxicol. 32:573-596 (1993); Mulligan, Science 260:926-932 (1993); and Morgan and Anderson, Ann. Rev. Biochem. 62:191-217 (1993); May, 1993, TIB TECH 11(5):155-215 (1993)); and hygro, which confers resistance to hygromycin (Santerre et al., Gene 30:147 (1984)). Methods commonly known in the art of recombinant DNA technology may be routinely applied to select the desired recombinant clone, and such methods are described, for example, in Ausubel et al. (eds.), Current Protocols in Molecular Biology, John Wiley & Sons, NY (1993); Kriegler, Gene Transfer and Expression, A Laboratory Manual, Stockton Press, NY (1990); and in Chapters 12 and 13, Dracopoli et al. (eds), Current Protocols in Human Genetics, John Wiley & Sons, NY (1994); Colberre-Garapin et al., J. Mol. Biol. 150:1 (1981), which are incorporated by reference herein in their entireties.

[0251] The expression levels of an antibody molecule can be increased by vector amplification (for a review, see Bebbington and Hentschel, The use of vectors based on gene amplification for the expression of cloned genes in mammalian cells in DNA cloning, Vol.3. (Academic Press, New York, 1987)). When a marker in the vector system expressing antibody is amplifiable, increase in the level of inhibitor present in culture of host cell will increase the number of copies of the marker gene. Since the amplified region is associated with the antibody gene, production of the antibody will also increase (Crouse et al., Mol. Cell. Biol. 3:257 (1983)).

[0252] Vectors which use glutamine synthase (GS) or DHFR as the selectable markers can be amplified in the presence of the drugs methionine sulphoximine or methotrexate, respectively. An advantage of glutamine synthase based vectors are the availabilty of cell lines (e.g., the murine myeloma cell line, NS0) which are glutamine synthase negative. Glutamine synthase expression systems can also function in glutamine synthase expressing cells (e.g. Chinese Hamster Ovary (CHO) cells) by providing additional inhibitor to prevent the functioning of the endogenous gene. A glutamine synthase expression system and components thereof are detailed in PCT publications: WO87/04462; WO86/05807; WO89/01036; WO89/10404; and WO91/06657 which are incorporated in their entireties by reference herein. Additionally, glutamine synthase expression vectors that may be used according to the present invention are commercially available from suplliers, including, for example Lonza Biologics, Inc. (Portsmouth, N.H.). Expression and production of monoclonal antibodies using a GS expression system in murine myeloma cells is described in Bebbington et al., Bio/technology 10:169(1992) and in Biblia and Robinson Biotechnol. Prog. 11:1 (1995) which are incorporated in their entirities by reference herein.

[0253] The host cell may be co-transfected with two expression vectors of the invention, the first vector encoding a heavy chain derived polypeptide and the second vector encoding a light chain derived polypeptide. The two vectors may contain identical selectable markers which enable equal expression of heavy and light chain polypeptides. Alternatively, a single vector may be used which encodes, and is capable of expressing, both heavy and light chain polypeptides. In such situations, the light chain should be placed before the heavy chain to avoid an excess of toxic free heavy chain (Proudfoot, Nature 322:52 (1986); Kohler, Proc. Natl. Acad. Sci. USA 77:2197 (1980)). The coding sequences for the heavy and light chains may comprise cDNA or genomic DNA.

[0254] Once an antibody molecule of the invention has been produced by an animal, chemically synthesized, or recombinantly expressed, it may be purified by any method known in the art for purification of an immunoglobulin molecule, for example, by chromatography (e.g., ion exchange, affinity, particularly by affinity for the specific antigen after Protein A, and sizing column chromatography), centrifugation, differential solubility, or by any other standard technique for the purification of proteins. In addition, the antibodies of the present invention or fragments thereof can be fused to heterologous polypeptide sequences described herein or otherwise known in the art, to facilitate purification.

[0255] The present invention encompasses antibodies recombinantly fused or chemically conjugated (including both covalently and non-covalently conjugations) to a polypeptide (or portion thereof, preferably at least 10, 20, 30, 40, 50, 60, 70, 80, 90 or 100 amino acids of the polypeptide) of the present invention to generate fusion proteins. The fusion does not necessarily need to be direct, but may occur through linker sequences. The antibodies may be specific for antigens other than polypeptides (or portion thereof, preferably at least 10, 20, 30, 40, 50, 60, 70, 80, 90 or 100 amino acids of the polypeptide) of the present invention. For example, antibodies may be used to target the polypeptides of the present invention to particular cell types, either in vitro or in vivo, by fusing or conjugating the polypeptides of the present invention to antibodies specific for particular cell surface receptors. Antibodies fused or conjugated to the polypeptides of the present invention may also be used in in vitro immunoassays and purification methods using methods known in the art. See e.g., Harbor et al., supra, and PCT publication WO 93/21232; EP 439,095; Naramura et al., Immunol. Lett. 39:91-99 (1994); U.S. Pat. No. 5,474,981; Gillies et al., PNAS 89:1428-1432 (1992); Fell et al., J. Immunol. 146:2446-2452 (1991), which are incorporated by reference in their entireties.

[0256] The present invention further includes compositions comprising the polypeptides of the present invention fused or conjugated to antibody domains other than the variable regions. For example, the polypeptides of the present invention may be fused or conjugated to an antibody Fc region, or portion thereof. The antibody portion fused to a polypeptide of the present invention may comprise the constant region, hinge region, CH1 domain, CH2 domain, and CH3 domain or any combination of whole domains or portions thereof. The polypeptides may also be fused or conjugated to the above antibody portions to form multimers. For example, Fc portions fused to the polypeptides of the present invention can form dimers through disulfide bonding between the Fc portions. Higher multimeric forms can be made by fusing the polypeptides to portions of IgA and IgM. Methods for fusing or conjugating the polypeptides of the present invention to antibody portions are known in the art. See, e.g., U.S. Pat. Nos. 5,336,603; 5,622,929; 5,359,046; 5,349,053; 5,447,851; 5,112,946; EP 307,434; EP 367,166; PCT publications WO 96/04388; WO 91/06570; Ashkenazi et al., Proc. Natl. Acad. Sci. USA 88:10535-10539 (1991); Zheng et al., J. Immunol. 154:5590-5600 (1995); and Vil et al., Proc. Natl. Acad. Sci. USA 89:11337-11341 (1992) (said references incorporated by reference in their entireties).

[0257] As discussed, supra, the polypeptides corresponding to a polypeptide, polypeptide fragment, or a variant of SEQ ID NO:Y may be fused or conjugated to the above antibody portions to increase the in vivo half life of the polypeptides or for use in immunoassays using methods known in the art. Further, the polypeptides corresponding to SEQ ID NO:Y may be fused or conjugated to the above antibody portions to facilitate purification. One reported example describes chimeric proteins consisting of the first two domains of the human CD4-polypeptide and various domains of the constant regions of the heavy or light chains of mammalian immunoglobulins. See EP 394,827; and Traunecker et al., Nature 331:84-86 (1988). The polypeptides of the present invention fused or conjugated to an antibody having disulfide-linked dimeric structures (due to the IgG) may also be more efficient in binding and neutralizing other molecules, than the monomeric secreted protein or protein fragment alone. See, for example, Fountoulakis et al., J. Biochem. 270:3958-3964 (1995). In many cases, the Fc part in a fusion protein is beneficial in therapy and diagnosis, and thus can result in, for example, improved pharmacokinetic properties. See, for example, EP A 232,262. Alternatively, deleting the Fc part after the fusion protein has been expressed, detected, and purified, would be desired. For example, the Fc portion may hinder therapy and diagnosis if the fusion protein is used as an antigen for immunizations. In drug discovery, for example, human proteins, such as hIL-5, have been fused with Fc portions for the purpose of high-throughput screening assays to identify antagonists of hIL-5. (See, Bennett et al., J. Molecular Recognition 8:52-58 (1995); Johanson et al., J. Biol. Chem. 270:9459-9471 (1995)).

[0258] Moreover, the antibodies or fragments thereof of the present invention can be fused to marker sequences, such as a peptide to facilitate purification. In preferred embodiments, the marker amino acid sequence is a hexa-histidine peptide, such as the tag provided in a pQE vector (QIAGEN, Inc., 9259 Eton Avenue, Chatsworth, Calif., 91311), among others, many of which are commercially available. As described in Gentz et al., Proc. Natl. Acad. Sci. USA 86:821-824 (1989), for instance, hexa-histidine provides for convenient purification of the fusion protein. Other peptide tags useful for purification include, but are not limited to, the “HA” tag, which corresponds to an epitope derived from the influenza hemagglutinin protein (Wilson et al., Cell 37:767 (1984)) and the “flag” tag.

[0259] The present invention further encompasses antibodies or fragments thereof conjugated to a diagnostic or therapeutic agent. The antibodies can be used diagnostically to, for example, monitor the development or progression of a tumor as part of a clinical testing procedure to, e.g., determine the efficacy of a given treatment regimen. Detection can be facilitated by coupling the antibody to a detectable substance. Examples of detectable substances include various enzymes, prosthetic groups, fluorescent materials, luminescent materials, bioluminescent materials, radioactive materials, positron emitting metals using various positron emission tomographies, and nonradioactive paramagnetic metal ions. The detectable substance may be coupled or conjugated either directly to the antibody (or fragment thereof) or indirectly, through an intermediate (such as, for example, a linker known in the art) using techniques known in the art. See, for example, U.S. Pat. No. 4,741,900 for metal ions which can be conjugated to antibodies for use as diagnostics according to the present invention. Examples of suitable enzymes include horseradish peroxidase, alkaline phosphatase, beta-galactosidase, or acetylcholinesterase; examples of suitable prosthetic group complexes include streptavidin/biotin and avidinibiotin; examples of suitable fluorescent materials include umbelliferone, fluorescein, fluorescein isothiocyanate, rhodamine, dichlorotriazinylamine fluorescein, dansyl chloride or phycoerythrin; an example of a luminescent material includes luminol; examples of bioluminescent materials include luciferase, luciferin, and aequorin; and examples of suitable radioactive material include 125I, 131I, 111In or 99Tc.

[0260] Further, an antibody or fragment thereof may be conjugated to a therapeutic moiety such as a cytotoxin, e.g., a cytostatic or cytocidal agent, a therapeutic agent or a radioactive metal ion, e.g., alpha-emitters such as, for example, 213Bi. A cytotoxin or cytotoxic agent includes any agent that is detrimental to cells. Examples include paclitaxol, cytochalasin B, gramicidin D, ethidium bromide, emetine, mitomycin, etoposide, tenoposide, vincristine, vinblastine, colchicin, doxorubicin, daunorubicin, dihydroxy anthracin dione, mitoxantrone, mithramycin, actinomycin D, 1-dehydrotestosterone, glucocorticoids, procaine, tetracaine, lidocaine, propranolol, and puromycin and analogs or homologs thereof. Therapeutic agents include, but are not limited to, antimetabolites (e.g., methotrexate, 6-mercaptopurine, 6-thioguanine, cytarabine, 5-fluorouracil decarbazine), alkylating agents (e.g., mechlorethamine, thioepa chlorambucil, melphalan, carmustine (BSNU) and lomustine (CCNU), cyclothosphamide, busulfan, dibromomannitol, streptozotocin, mitomycin C, and cis-dichlorodiamine platinum (II) (DDP) cisplatin), anthracyclines (e.g., daunorubicin (formerly daunomycin) and doxorubicin), antibiotics (e.g., dactinomycin (formerly actinomycin), bleomycin, mithramycin, and anthramycin (AMC)), and anti-mitotic agents (e.g., vincristine and vinblastine).

[0261] The conjugates of the invention can be used for modifying a given biological response, the therapeutic agent or drug moiety is not to be construed as limited to classical chemical therapeutic agents. For example, the drug moiety may be a protein or polypeptide possessing a desired biological activity. Such proteins may include, for example, a toxin such as abrin, ricin A, pseudomonas exotoxin, or diphtheria toxin; a protein such as tumor necrosis factor, a-interferon, β-interferon, nerve growth factor, platelet derived growth factor, tissue plasminogen activator, an apoptotic agent, e.g., TNF-alpha, TNF-beta, AIM I (See, International Publication No. WO 97/33899), AIM II (See, International Publication No. WO 97/34911), Fas Ligand (Takahashi et al., Int. Immunol., 6:1567-1574 (1994)), VEGI (See, International Publication No. WO 99/23105), a thrombotic agent or an anti-angiogenic agent, e.g., angiostatin or endostatin; or, biological response modifiers such as, for example, lymphokines, interleukin-1 (“IL-1”), interleukin-2 (“IL-2”), interleukin-6 (“IL-6”), granulocyte macrophage colony stimulating factor (“GM-CSF”), granulocyte colony stimulating factor (“G-CSF”), or other growth factors.

[0262] Antibodies may also be attached to solid supports, which are particularly useful for immunoassays or purification of the target antigen. Such solid supports include, but are not limited to, glass, cellulose, polyacrylamide, nylon, polystyrene, polyvinyl chloride or polypropylene.

[0263] Techniques for conjugating such therapeutic moiety to antibodies are well known. See, for example, Arnon et al., “Monoclonal Antibodies For Immunotargeting Of Drugs In Cancer Therapy”, in Monoclonal Antibodies And Cancer Therapy, Reisfeld et al. (eds.), pp. 243-56 (Alan R. Liss, Inc. 1985); Hellstrom et al., “Antibodies For Drug Delivery”, in Controlled Drug Delivery (2nd Ed.), Robinson et al. (eds.), pp. 623-53 (Marcel Dekker, Inc. 1987); Thorpe, “Antibody Carriers Of Cytotoxic Agents In Cancer Therapy: A Review”, in Monoclonal Antibodies '84: Biological And Clinical Applications, Pinchera et al. (eds.), pp. 475-506 (1985); “Analysis, Results, And Future Prospective Of The Therapeutic Use Of Radiolabeled Antibody In Cancer Therapy”, in Monoclonal Antibodies For Cancer Detection And Therapy, Baldwin et al. (eds.), pp. 303-16 (Academic Press 1985), and Thorpe et al., “The Preparation And Cytotoxic Properties Of Antibody-Toxin Conjugates”, Immunol. Rev. 62:119-58 (1982).

[0264] Alternatively, an antibody can be conjugated to a second antibody to form an antibody heteroconjugate as described by Segal in U.S. Pat. No. 4,676,980, which is incorporated herein by reference in its entirety.

[0265] An antibody, with or without a therapeutic moiety conjugated to it, administered alone or in combination with cytotoxic factor(s) and/or cytokine(s) can be used as a therapeutic.

### Immunophenotyping

[0266] The antibodies of the invention may be utilized for immunophenotyping of cell lines and biological samples. Translation products of the gene of the present invention may be useful as cell-specific markers, or more specifically as cellular markers that are differentially expressed at various stages of differentiation and/or maturation of particular cell types. Monoclonal antibodies directed against a specific epitope, or combination of epitopes, will allow for the screening of cellular populations expressing the marker. Various techniques can be utilized using monoclonal antibodies to screen for cellular populations expressing the marker(s), and include magnetic separation using antibody-coated magnetic beads, “panning” with antibody attached to a solid matrix (i.e., plate), and flow cytometry (See, e.g., U.S. Pat. No. 5,985,660; and Morrison et al., Cell, 96:737-49 (1999)).

[0267] These techniques allow for the screening of particular populations of cells, such as might be found with hematological malignancies (i.e. minimal residual disease (MRD) in acute leukemic patients) and “non-self” cells in transplantations to prevent Graft-versus-Host Disease (GVHD). Alternatively, these techniques allow for the screening of hematopoietic stem and progenitor cells capable of undergoing proliferation and/or differentiation, as might be found in human umbilical cord blood.

### Assays For Antibody Binding

[0268] The antibodies of the invention may be assayed for immunospecific binding by any method known in the art. The immunoassays which can be used include but are not limited to competitive and non-competitive assay systems using techniques such as western blots, radioimmunoassays, ELISA (enzyme linked immunosorbent assay), “sandwich” immunoassays, immunoprecipitation assays, precipitin reactions, gel diffusion precipitin reactions, immunodiffusion assays, agglutination assays, complement-fixation assays, immunoradiometric assays, fluorescent immunoassays, and protein A immunoassays, to name but a few. Such assays are routine and well known in the art (see, e.g., Ausubel et al, eds, 1994, Current Protocols in Molecular Biology, Vol. 1, John Wiley & Sons, Inc., New York, which is incorporated by reference herein in its entirety). Exemplary immunoassays are described briefly below (but are not intended by way of limitation).

[0269] Immunoprecipitation protocols generally comprise lysing a population of cells in a lysis buffer such as RIPA buffer (1% NP-40 or Triton X-100, 1% sodium deoxycholate, 0.1% SDS, 0.15 M NaCl, 0.01 M sodium phosphate at pH 7.2, 1% Trasylol) supplemented with protein phosphatase and/or protease inhibitors (e.g., EDTA, PMSF, aprotinin, sodium vanadate), adding the antibody of interest to the cell lysate, incubating for a period of time (e.g., 1-4 hours) at 4° C., adding protein A and/or protein G sepharose beads to the cell lysate, incubating for about an hour or more at 4° C., washing the beads in lysis buffer and resuspending the beads in SDS/sample buffer. The ability of the antibody of interest to immunoprecipitate a particular antigen can be assessed by, e.g., western blot analysis. One of skill in the art would be knowledgeable as to the parameters that can be modified to increase the binding of the antibody to an antigen and decrease the background (e.g., pre-clearing the cell lysate with sepharose beads). For further discussion regarding immunoprecipitation protocols see, e.g., Ausubel et al., eds., (1994), Current Protocols in Molecular Biology, Vol. 1, John Wiley & Sons, Inc., New York, section 10.16.1.

[0270] Western blot analysis generally comprises preparing protein samples, electrophoresis of the protein samples in a polyacrylamide gel (e.g., 8%-20% SDS-PAGE depending on the molecular weight of the antigen), transferring the protein sample from the polyacrylamide gel to a membrane such as nitrocellulose, PVDF or nylon, blocking the membrane in blocking solution (e.g., PBS with 3% BSA or non-fat milk), washing the membrane in washing buffer (e.g., PBS-Tween 20), blocking the membrane with primary antibody (the antibody of interest) diluted in blocking buffer, washing the membrane in washing buffer, blocking the membrane with a secondary antibody (which recognizes the primary antibody, e.g., an anti-human antibody) conjugated to an enzymatic substrate (e.g., horseradish peroxidase or alkaline phosphatase) or radioactive molecule (e.g., 32P or 125I) diluted in blocking buffer, washing the membrane in wash buffer, and detecting the presence of the antigen. One of skill in the art would be knowledgeable as to the parameters that can be modified to increase the signal detected and to reduce the background noise. For further discussion regarding western blot protocols see, e.g., Ausubel et al, eds, (1994), Current Protocols in Molecular Biology, Vol. 1, John Wiley & Sons, Inc., New York, section 10.8.1.

[0271] ELISAs comprise preparing antigen, coating the well of a 96 well microtiter plate with the antigen, adding the antibody of interest conjugated to a detectable compound such as an enzymatic substrate (e.g., horseradish peroxidase or alkaline phosphatase) to the well and incubating for a period of time, and detecting the presence of the antigen. In ELISAs the antibody of interest does not have to be conjugated to a detectable compound; instead, a second antibody (which recognizes the antibody of interest) conjugated to a detectable compound may be added to the well. Further, instead of coating the well with the antigen, the antibody may be coated to the well. In this case, a second antibody conjugated to a detectable compound may be added following the addition of the antigen of interest to the coated well. One of skill in the art would be knowledgeable as to the parameters that can be modified to increase the signal detected as well as other variations of ELISAs known in the art. For further discussion regarding ELISAs see, e.g., Ausubel et al, eds, (1994), Current Protocols in Molecular Biology, Vol. 1, John Wiley & Sons, Inc., New York, section 11.2.1.

[0272] The binding affinity of an antibody to an antigen and the off-rate of an antibody-antigen interaction can be determined by competitive binding assays. One example of a competitive binding assay is a radioimmunoassay comprising the incubation of labeled antigen (e.g., 3H or 125I) with the antibody of interest in the presence of increasing amounts of unlabeled antigen, and the detection of the antibody bound to the labeled antigen. The affinity of the antibody of interest for a particular antigen and the binding off-rates can be determined from the data by scatchard plot analysis. Competition with a second antibody can also be determined using radioimmunoassays. In this case, the antigen is incubated with antibody of interest conjugated to a labeled compound (e.g., 3H or 125I) in the presence of increasing amounts of an unlabeled second antibody.

[0273] Antibodies of the invention may be characterized using immunocytochemisty methods on cells (e.g., mammalian cells, such as CHO cells) transfected with a vector enabling the expression of an antigen or with vector alone using techniques commonly known in the art. Antibodies that bind antigen transfected cells, but not vector-only transfected cells, are antigen specific.

### Therapeutic Uses

[0274] The present invention is further directed to antibody-based therapies which involve administering antibodies of the invention to an animal, preferably a mammal, and most preferably a human, patient for treating one or more of the disclosed diseases, disorders, or conditions. Therapeutic compounds of the invention include, but are not limited to, antibodies of the invention (including fragments, analogs and derivatives thereof as described herein) and nucleic acids encoding antibodies of the invention (including fragments, analogs and derivatives thereof and anti-idiotypic antibodies as described herein). The antibodies of the invention can be used to treat, inhibit or prevent diseases, disorders or conditions associated with aberrant expression and/or activity of a polypeptide of the invention, including, but not limited to, any one or more of the diseases, disorders, or conditions described herein. The treatment and/or prevention of diseases, disorders, or conditions associated with aberrant expression and/or activity of a polypeptide of the invention includes, but is not limited to, alleviating symptoms associated with those diseases, disorders or conditions. Antibodies of the invention may be provided in pharmaceutically acceptable compositions as known in the art or as described herein.

[0275] In a specific and preferred embodiment, the present invention is directed to antibody-based therapies which involve administering antibodies of the invention to an animal, preferably a mammal, and most preferably a human, patient for treating one or more diseases, disorders, or conditions, including but not limited to: neural disorders, immune system disorders, muscular disorders, reproductive disorders, gastrointestinal disorders, pulmonary disorders, cardiovascular disorders, renal disorders, proliferative disorders, and/or cancerous diseases and conditions., and/or as described elsewhere herein. Therapeutic compounds of the invention include, but are not limited to, antibodies of the invention (e.g., antibodies directed to the fill length protein expressed on the cell surface of a mammalian cell; antibodies directed to an epitope of a polypeptide of the invention (such as, for example, a predicted linear epitope shown in column 7 of Table 1A; or a conformational epitope, including fragments, analogs and derivatives thereof as described herein) and nucleic acids encoding antibodies of the invention (including fragments, analogs and derivatives thereof and anti-idiotypic antibodies as described herein). The antibodies of the invention can be used to treat, inhibit or prevent diseases, disorders or conditions associated with aberrant expression and/or activity of a polypeptide of the invention, including, but not limited to, any one or more of the diseases, disorders, or conditions described herein. The treatment and/or prevention of diseases, disorders, or conditions associated with aberrant expression and/or activity of a polypeptide of the invention includes, but is not limited to, alleviating symptoms associated with those diseases, disorders or conditions. Antibodies of the invention may be provided in pharmaceutically acceptable compositions as known in the art or as described herein.

[0276] A summary of the ways in which the antibodies of the present invention may be used therapeutically includes binding polynucleotides or polypeptides of the present invention locally or systemically in the body or by direct cytotoxicity of the antibody, e.g. as mediated by complement (CDC) or by effector cells (ADCC). Some of these approaches are described in more detail below. Armed with the teachings provided herein, one of ordinary skill in the art will know how to use the antibodies of the present invention for diagnostic, monitoring or therapeutic purposes without undue experimentation.

[0277] The antibodies of this invention may be advantageously utilized in combination with other monoclonal or chimeric antibodies, or with lymphokines or hematopoietic growth factors (such as, e.g., IL-2, IL-3 and IL-7), for example, which serve to increase the number or activity of effector cells which interact with the antibodies.

[0278] The antibodies of the invention may be administered alone or in combination with other types of treatments (e.g., radiation therapy, chemotherapy, hormonal therapy, immunotherapy and anti-tumor agents). Generally, administration of products of a species origin or species reactivity (in the case of antibodies) that is the same species as that of the patient is preferred. Thus, in a preferred embodiment, human antibodies, fragments derivatives, analogs, or nucleic acids, are administered to a human patient for therapy or prophylaxis.

[0279] It is preferred to use high affinity and/or potent in vivo inhibiting and/or neutralizing antibodies against polypeptides or polynucleotides of the present invention, fragments or regions thereof, for both immunoassays directed to and therapy of disorders related to polynucleotides or polypeptides, including fragments thereof, of the present invention. Such antibodies, fragments, or regions, will preferably have an affinity for polynucleotides or polypeptides of the invention, including fragments thereof. Preferred binding affinities include those with a dissociation constant or Kd less than 5×10⁻² M, 10⁻² M, 5×10⁻³ M, 10⁻³ M, 5×10⁻⁴ M, 10⁻⁴ M, 5×10⁻⁵ M, 10⁻⁵ M, 5×10⁻⁶ M, 10⁻⁶ M, 5×10⁻⁷ M, 10⁻⁷ M, 5×10⁻⁸ M, 10⁻⁸ M, 5×10⁻⁹ M, 10⁻⁹ M, 5×10⁻¹⁰ M, 10⁻¹⁰ M, 5×10⁻¹¹ M, 10⁻¹¹ M, 5×10⁻¹² M, 10⁻¹² M, 5×10⁻¹³ M, 10⁻¹³ M, 5×10⁻¹⁴ M, 10⁻¹⁴ M, 5×10⁻¹⁵ M, and 10⁻¹⁵ M.

### Gene Therapy

[0280] In a specific embodiment, nucleic acids comprising sequences encoding antibodies or functional derivatives thereof, are administered to treat, inhibit or prevent a disease or disorder associated with aberrant expression and/or activity of a polypeptide of the invention, by way of gene therapy. Gene therapy refers to therapy performed by the administration to a subject of an expressed or expressible nucleic acid. In this embodiment of the invention, the nucleic acids produce their encoded protein that mediates a therapeutic effect.

[0281] Any of the methods for gene therapy available in the art can be used according to the present invention. Exemplary methods are described below.

[0282] For general reviews of the methods of gene therapy, see Goldspiel et al., Clinical Pharmacy 12:488-505 (1993); Wu and Wu, Biotherapy 3:87-95 (1991); Tolstoshev, Ann. Rev. Pharmacol. Toxicol. 32:573-596 (1993); Mulligan, Science 260:926-932 (1993); and Morgan and Anderson, Ann. Rev. Biochem. 62:191-217 (1993); May, TIBTECH 11(5):155-215 (1993). Methods commonly known in the art of recombinant DNA technology which can be used are described in Ausubel et al. (eds.), Current Protocols in Molecular Biology, John Wiley & Sons, NY (1993); and Kriegler, Gene Transfer and Expression, A Laboratory Manual, Stockton Press, NY (1990).

[0283] In a preferred embodiment, the compound comprises nucleic acid sequences encoding an antibody, said nucleic acid sequences being part of expression vectors that express the antibody or fragments or chimeric proteins or heavy or light chains thereof in a suitable host. In particular, such nucleic acid sequences have promoters operably linked to the antibody coding region, said promoter being, inducible or constitutive, and, optionally, tissue-specific. In another particular embodiment, nucleic acid molecules are used in which the antibody coding sequences and any other desired sequences are flanked by regions that promote homologous recombination at a desired site in the genome, thus providing for intrachromosomal expression of the antibody encoding nucleic acids (Koller and Smithies, Proc. Natl. Acad. Sci. USA 86:8932-8935 (1989); Zijlstra et al., Nature 342:435-438 (1989). In specific embodiments, the expressed antibody molecule is a single chain antibody; alternatively, the nucleic acid sequences include sequences encoding both the heavy and light chains, or fragments thereof, of the antibody.

[0284] Delivery of the nucleic acids into a patient may be either direct, in which case the patient is directly exposed to the nucleic acid or nucleic acid- carrying vectors, or indirect, in which case, cells are first transformed with the nucleic acids in vitro, then transplanted into the patient. These two approaches are known, respectively, as in vivo or ex vivo gene therapy.

[0285] In a specific embodiment, the nucleic acid sequences are directly administered in vivo, where it is expressed to produce the encoded product. This can be accomplished by any of numerous methods known in the art, e.g., by constructing them as part of an appropriate nucleic acid expression vector and administering it so that they become intracellular, e.g., by infection using defective or attenuated retrovirals or other viral vectors (see U.S. Pat. No. 4,980,286), or by direct injection of naked DNA, or by use of microparticle bombardment (e.g., a gene gun; Biolistic, Dupont), or coating with lipids or cell-surface receptors or transfecting agents, encapsulation in liposomes, microparticles, or microcapsules, or by administering them in linkage to a peptide which is known to enter the nucleus, by administering it in linkage to a ligand subject to receptor-mediated endocytosis (see, e.g., Wu and Wu, J. Biol. Chem. 262:4429-4432 (1987)) (which can be used to target cell types specifically expressing the receptors), etc. In another embodiment, nucleic acid-ligand complexes can be formed in which the ligand comprises a fusogenic viral peptide to disrupt endosomes, allowing the nucleic acid to avoid lysosomal degradation. In yet another embodiment, the nucleic acid can be targeted in vivo for cell specific uptake and expression, by targeting a specific receptor (see, e.g., PCT Publications WO 92/06180; WO 92/22635; WO92/20316; WO93/14188, WO 93/20221). Alternatively, the nucleic acid can be introduced intracellularly and incorporated within host cell DNA for expression, by homologous recombination (Koller and Smithies, Proc. Natl. Acad. Sci. USA 86:8932-8935 (1989); Zijlstra et al., Nature 342:435-438 (1989)).

[0286] In a specific embodiment, viral vectors that contains nucleic acid sequences encoding an antibody of the invention are used. For example, a retroviral vector can be used (see Miller et al., Meth. Enzymol. 217:581-599 (1993)). These retroviral vectors contain the components necessary for the correct packaging of the viral genome and integration into the host cell DNA. The nucleic acid sequences encoding the antibody to be used in gene therapy are cloned into one or more vectors, which facilitates delivery of the gene into a patient. More detail about retroviral vectors can be found in Boesen et al., Biotherapy 6:291-302 (1994), which describes the use of a retroviral vector to deliver the mdrl gene to hematopoietic stem cells in order to make the stem cells more resistant to chemotherapy. Other references illustrating the use of retroviral vectors in gene therapy are: Clowes et al., J. Clin. Invest. 93:644-651 (1994); Kiem et al., Blood 83:1467-1473 (1994); Salmons and Gunzberg, Human Gene Therapy 4:129-141 (1993); and Grossman and Wilson, Curr. Opin. in Genetics and Devel. 3:110-114 (1993).

[0287] Adenoviruses are other viral vectors that can be used in gene therapy. Adenoviruses are especially attractive vehicles for delivering genes to respiratory epithelia. Adenoviruses naturally infect respiratory epithelia where they cause a mild disease. Other targets for adenovirus-based delivery systems are liver, the central nervous system, endothelial cells, and muscle. Adenoviruses have the advantage of being capable of infecting non-dividing cells. Kozarsky and Wilson, Current Opinion in Genetics and Development 3:499-503 (1993) present a review of adenovirus-based gene therapy. Bout et al., Human Gene Therapy 5:3-10 (1994) demonstrated the use of adenovirus vectors to transfer genes to the respiratory epithelia of rhesus monkeys. Other instances of the use of adenoviruses in gene therapy can be found in Rosenfeld et al., Science 252:431-434 (1991); Rosenfeld et al., Cell 68:143-155 (1992); Mastrangeli et al., J. Clin. Invest. 91:225-234 (1993); PCT Publication WO94/12649; and Wang, et al., Gene Therapy 2:775-783 (1995). In a preferred embodiment, adenovirus vectors are used.

[0288] Adeno-associated virus (AAV) has also been proposed for use in gene therapy (Walsh et al., Proc. Soc. Exp. Biol. Med. 204:289-300 (1993); U.S. Pat. No. 5,436,146).

[0289] Another approach to gene therapy involves transferring a gene to cells in tissue culture by such methods as electroporation, lipofection, calcium phosphate mediated transfection, or viral infection. Usually, the method of transfer includes the transfer of a selectable marker to the cells. The cells are then placed under selection to isolate those cells that have taken up and are expressing the transferred gene. Those cells are then delivered to a patient.

[0290] In this embodiment, the nucleic acid is introduced into a cell prior to administration in vivo of the resulting recombinant cell. Such introduction can be carried out by any method known in the art, including but not limited to transfection, electroporation, microinjection, infection with a viral or bacteriophage vector containing the nucleic acid sequences, cell fusion, chromosome-mediated gene transfer, microcell-mediated gene transfer, spheroplast fusion, etc. Numerous techniques are known in the art for the introduction of foreign genes into cells (see, e.g., Loeffler and Behr, Meth. Enzymol. 217:599-618 (1993); Cohen et al., Meth. Enzymol. 217:618-644 (1993); Cline, Pharmac. Ther. 29:69-92m (1985) and may be used in accordance with the present invention, provided that the necessary developmental and physiological functions of the recipient cells are not disrupted. The technique should provide for the stable transfer of the nucleic acid to the cell, so that the nucleic acid is expressible by the cell and preferably heritable and expressible by its cell progeny.

[0291] The resulting recombinant cells can be delivered to a patient by various methods known in the art. Recombinant blood cells (e.g., hematopoietic stem or progenitor cells) are preferably administered intravenously. The amount of cells envisioned for use depends on the desired effect, patient state, etc., and can be determined by one skilled in the art.

[0292] Cells into which a nucleic acid can be introduced for purposes of gene therapy encompass any desired, available cell type, and include but are not limited to epithelial cells, endothelial cells, keratinocytes, fibroblasts, muscle cells, hepatocytes; blood cells such as T lymphocytes, B lymphocytes, monocytes, macrophages, neutrophils, eosinophils, megakaryocytes, granulocytes; various stem or progenitor cells, in particular hematopoietic stem or progenitor cells, e.g., as obtained from bone marrow, umbilical cord blood, peripheral blood, fetal liver, etc.

[0293] In a preferred embodiment, the cell used for gene therapy is autologous to the patient.

[0294] In an embodiment in which recombinant cells are used in gene therapy, nucleic acid sequences encoding an antibody are introduced into the cells such that they are expressible by the cells or their progeny, and the recombinant cells are then administered in vivo for therapeutic effect. In a specific embodiment, stem or progenitor cells are used. Any stem and/or progenitor cells which can be isolated and maintained in vitro can potentially be used in accordance with this embodiment of the present invention (see e.g. PCT Publication WO 94/08598; Stemple and Anderson, Cell 71:973-985 (1992); Rheinwald, Meth. Cell Bio. 21A:229 (1980); and Pittelkow and Scott, Mayo Clinic Proc. 61:771 (1986)).

[0295] In a specific embodiment, the nucleic acid to be introduced for purposes of gene therapy comprises an inducible promoter operably linked to the coding region, such that expression of the nucleic acid is controllable by the presence or absence of an appropriate inducer of transcription.

### Demonstration of Therapeutic or Prophylactic Activity

[0296] The compounds or pharmaceutical compositions of the invention are preferably tested in vitro, and then in vivo for the desired therapeutic or prophylactic activity, prior to use in humans. For example, in vitro assays to demonstrate the therapeutic or prophylactic utility of a compound or pharmaceutical composition include, the effect of a compound on a cell line or a patient tissue sample. The effect of the compound or composition on the cell line and/or tissue sample can be determined utilizing techniques known to those of skill in the art including, but not limited to, rosette formation assays and cell lysis assays. In accordance with the invention, in vitro assays which can be used to determine whether administration of a specific compound is indicated, include in vitro cell culture assays in which a patient tissue sample is grown in culture, and exposed to or otherwise administered a compound, and the effect of such compound upon the tissue sample is observed.

### Therapeutic/Prophylactic Administration and Composition

[0297] The invention provides methods of treatment, inhibition and prophylaxis by administration to a subject of an effective amount of a compound or pharmaceutical composition of the invention, preferably a polypeptide or antibody of the invention. In a preferred embodiment, the compound is substantially purified (e.g., substantially free from substances that limit its effect or produce undesired side-effects). The subject is preferably an animal, including but not limited to animals such as cows, pigs, horses, chickens, cats, dogs, etc., and is preferably a mammal, and most preferably human.

[0298] Formulations and methods of administration that can be employed when the compound comprises a nucleic acid or an immunoglobulin are described above; additional appropriate formulations and routes of administration can be selected from among those described herein below.

[0299] Various delivery systems are known and can be used to administer a compound of the invention, e.g., encapsulation in liposomes, microparticles, microcapsules, recombinant cells capable of expressing the compound, receptor-mediated endocytosis (see, e.g., Wu and Wu, J. Biol. Chem. 262:4429-4432 (1987)), construction of a nucleic acid as part of a retroviral or other vector, etc. Methods of introduction include but are not limited to intradermal, intramuscular, intraperitoneal, intravenous, subcutaneous, intranasal, epidural, and oral routes. The compounds or compositions may be administered by any convenient route, for example by infusion or bolus injection, by absorption through epithelial or mucocutaneous linings (e.g., oral mucosa, rectal and intestinal mucosa, etc.) and may be administered together with other biologically active agents. Administration can be systemic or local. In addition, it may be desirable to introduce the pharmaceutical compounds or compositions of the invention into the central nervous system by any suitable route, including intraventricular and intrathecal injection; intraventricular injection may be facilitated by an intraventricular catheter, for example, attached to a reservoir, such as an Ommaya reservoir. Pulmonary administration can also be employed, e.g., by use of an inhaler or nebulizer, and formulation with an aerosolizing agent.

[0300] In a specific embodiment, it may be desirable to administer the pharmaceutical compounds or compositions of the invention locally to the area in need of treatment; this may be achieved by, for example, and not by way of limitation, local infusion during surgery, topical application, e.g., in conjunction with a wound dressing after surgery, by injection, by means of a catheter, by means of a suppository, or by means of an implant, said implant being of a porous, non-porous, or gelatinous material, including membranes, such as sialastic membranes, or fibers. Preferably, when administering a protein, including an antibody, of the invention, care must be taken to use materials to which the protein does not absorb.

[0301] In another embodiment, the compound or composition can be delivered in a vesicle, in particular a liposome (see Langer, Science 249:1527-1533 (1990); Treat et al., in Liposomes in the Therapy of Infectious Disease and Cancer, Lopez-Berestein and Fidler (eds.), Liss, New York, pp. 353-365 (1989); Lopez-Berestein, ibid., pp. 317-327; see generally ibid.)

[0302] In yet another embodiment, the compound or composition can be delivered in a controlled release system. In one embodiment, a pump may be used (see Langer, supra; Sefton, CRC Crit. Ref. Biomed. Eng. 14:201 (1987); Buchwald et al., Surgery 88:507 (1980); Saudek et al., N. Engl. J. Med. 321:574 (1989)). In another embodiment, polymeric materials can be used (see Medical Applications of Controlled Release, Langer and Wise (eds.), CRC Pres., Boca Raton, Fla. (1974); Controlled Drug Bioavailability, Drug Product Design and Performance, Smolen and Ball (eds.), Wiley, New York (1984); Ranger and Peppas, J., Macromol. Sci. Rev. Macromol. Chem. 23:61 (1983); see also Levy et al., Science 228:190 (1985); During et al., Ann. Neurol. 25:351 (1989); Howard et al., J. Neurosurg. 71:105 (1989)). In yet another embodiment, a controlled release system can be placed in proximity of the therapeutic target, e.g., the brain, thus requiring only a fraction of the systemic dose (see, e.g., Goodson, in Medical Applications of Controlled Release, supra, vol. 2, pp. 115-138 (1984)).

[0303] Other controlled release systems are discussed in the review by Langer (Science 249:1527-1533 (1990)).

[0304] In a specific embodiment where the compound of the invention is a nucleic acid encoding a protein, the nucleic acid can be administered in vivo to promote expression of its encoded protein, by constructing it as part of an appropriate nucleic acid expression vector and administering it so that it becomes intracellular, e.g., by use of a retroviral vector (see U.S. Pat. No. 4,980,286), or by direct injection, or by use of microparticle bombardment (e.g., a gene gun; Biolistic, Dupont), or coating with lipids or cell-surface receptors or transfecting agents, or by administering it in linkage to a homeobox- like peptide which is known to enter the nucleus (see e.g., Joliot et al., Proc. Natl. Acad. Sci. USA 88:1864-1868 (1991)), etc. Alternatively, a nucleic acid can be introduced intracellularly and incorporated within host cell DNA for expression, by homologous recombination.

[0305] The present invention also provides pharmaceutical compositions. Such compositions comprise a therapeutically effective amount of a compound, and a pharmaceutically acceptable carrier. In a specific embodiment, the term “pharmaceutically acceptable” means approved by a regulatory agency of the Federal or a state government or listed in the U.S. Pharnacopeia or other generally recognized pharmacopeia for use in animals, and more particularly in humans. The term “carrier” refers to a diluent, adjuvant, excipient, or vehicle with which the therapeutic is administered. Such pharmaceutical carriers can be sterile liquids, such as water and oils, including those of petroleum, animal, vegetable or synthetic origin, such as peanut oil, soybean oil, mineral oil, sesame oil and the like. Water is a preferred carrier when the pharmaceutical composition is administered intravenously. Saline solutions and aqueous dextrose and glycerol solutions can also be employed as liquid carriers, particularly for injectable solutions. Suitable pharmaceutical excipients include starch, glucose, lactose, sucrose, gelatin, malt, rice, flour, chalk, silica gel, sodium stearate, glycerol monostearate, talc, sodium chloride, dried skim milk, glycerol, propylene, glycol, water, ethanol and the like. The composition, if desired, can also contain minor amounts of wetting or emulsifying agents, or pH buffering agents. These compositions can take the form of solutions, suspensions, emulsion, tablets, pills, capsules, powders, sustained-release formulations and the like. The composition can be formulated as a suppository, with traditional binders and carriers such as triglycerides. Oral formulation can include standard carriers such as pharmaceutical grades of mannitol, lactose, starch, magnesium stearate, sodium saccharine, cellulose, magnesium carbonate, etc. Examples of suitable pharmaceutical carriers are described in “Remington's Pharmaceutical Sciences” by E. W. Martin. Such compositions will contain a therapeutically effective amount of the compound, preferably in purified form, together with a suitable amount of carrier so as to provide the form for proper administration to the patient. The formulation should suit the mode of administration.

[0306] In a preferred embodiment, the composition is formulated in accordance with routine procedures as a pharmaceutical composition adapted for intravenous administration to human beings. Typically, compositions for intravenous administration are solutions in sterile isotonic aqueous buffer. Where necessary, the composition may also include a solubilizing agent and a local anesthetic such as lignocaine to ease pain at the site of the injection. Generally, the ingredients are supplied either separately or mixed together in unit dosage form, for example, as a dry lyophilized powder or water free concentrate in a hermetically sealed container such as an ampoule or sachette indicating the quantity of active agent. Where the composition is to be administered by infusion, it can be dispensed with an infusion bottle containing sterile pharmaceutical grade water or saline. Where the composition is administered by injection, an ampoule of sterile water for injection or saline can be provided so that the ingredients may be mixed prior to administration.

[0307] The compounds of the invention can be formulated as neutral or salt forms. Pharmaceutically acceptable salts include those formed with anions such as those derived from hydrochloric, phosphoric, acetic, oxalic, tartaric acids, etc., and those formed with cations such as those derived from sodium, potassium, ammonium, calcium, ferric hydroxides, isopropylamine, triethylamine, 2-ethylamino ethanol, histidine, procaine, etc.

[0308] The amount of the compound of the invention which will be effective in the treatment, inhibition and prevention of a disease or disorder associated with aberrant expression and/or activity of a polypeptide of the invention can be determined by standard clinical techniques. In addition, in vitro assays may optionally be employed to help identify optimal dosage ranges. The precise dose to be employed in the formulation will also depend on the route of administration, and the seriousness of the disease or disorder, and should be decided according to the judgment of the practitioner and each patient's circumstances. Effective doses may be extrapolated from dose-response curves derived from in vitro or animal model test systems.

[0309] For antibodies, the dosage administered to a patient is typically 0.1 mg/kg to 100 mg/kg of the patient's body weight. Preferably, the dosage administered to a patient is between 0.1 mg/kg and 20 mg/kg of the patient's body weight, more preferably 1 mg/kg to 10 mg/kg of the patient's body weight. Generally, human antibodies have a longer half-life within the human body than antibodies from other species due to the immune response to the foreign polypeptides. Thus, lower dosages of human antibodies and less frequent administration is often possible. Further, the dosage and frequency of administration of antibodies of the invention may be reduced by enhancing uptake and tissue penetration (e.g., into the brain) of the antibodies by modifications such as, for example, lipidation.

[0310] The invention also provides a pharmaceutical pack or kit comprising one or more containers filled with one or more of the ingredients of the pharmaceutical compositions of the invention. Optionally associated with such container(s) can be a notice in the form prescribed by a governmental agency regulating the manufacture, use or sale of pharmaceuticals or biological products, which notice reflects approval by the agency of manufacture, use or sale for human administration.

### Diagnosis and Imaging

[0311] Labeled antibodies, and derivatives and analogs thereof, which specifically bind to a polypeptide of interest can be used for diagnostic purposes to detect, diagnose, or monitor diseases, disorders, and/or conditions associated with the aberrant expression and/or activity of a polypeptide of the invention. The invention provides for the detection of aberrant expression of a polypeptide of interest, comprising (a) assaying the expression of the polypeptide of interest in cells or body fluid of an individual using one or more antibodies specific to the polypeptide interest and (b) comparing the level of gene expression with a standard gene expression level, whereby an increase or decrease in the assayed polypeptide gene expression level compared to the standard expression level is indicative of aberrant expression.

[0312] The invention provides a diagnostic assay for diagnosing a disorder, comprising (a) assaying the expression of the polypeptide of interest in cells or body fluid of an individual using one or more antibodies specific to the polypeptide interest and (b) comparing the level of gene expression with a standard gene expression level, whereby an increase or decrease in the assayed polypeptide gene expression level compared to the standard expression level is indicative of a particular disorder. With respect to cancer, the presence of a relatively high amount of transcript in biopsied tissue from an individual may indicate a predisposition for the development of the disease, or may provide a means for detecting the disease prior to the appearance of actual clinical symptoms. A more definitive diagnosis of this type may allow health professionals to employ preventative measures or aggressive treatment earlier thereby preventing the development or further progression of the cancer.

[0313] Antibodies of the invention can be used to assay protein levels in a biological sample using classical immunohistological methods known to those of skill in the art (e.g., see Jalkanen et al., J. Cell. Biol. 101:976-985 (1985); Jalkanen et al., J. Cell . Biol. 105:3087-3096 (1987)). Other antibody-based methods useful for detecting protein gene expression include immunoassays, such as the enzyme linked immunosorbent assay (ELISA) and the radioimmunoassay (RIA). Suitable antibody assay labels are known in the art and include enzyme labels, such as, glucose oxidase; radioisotopes, such as iodine (125I, 121I), carbon (14C), sulfur (35S), tritium (3H), indium (112In), and technetium (99Tc); luminescent labels, such as luminol; and fluorescent labels, such as fluorescein and rhodamine, and biotin.

[0314] One facet of the invention is the detection and diagnosis of a disease or disorder associated with aberrant expression of a polypeptide of interest in an animal, preferably a mammal and most preferably a human. In one embodiment, diagnosis comprises: a) administering (for example, parenterally, subcutaneously, or intraperitoneally) to a subject an effective amount of a labeled molecule which specifically binds to the polypeptide of interest; b) waiting for a time interval following the administering for permitting the labeled molecule to preferentially concentrate at sites in the subject where the polypeptide is expressed (and for unbound labeled molecule to be cleared to background level); c) determining background level; and d) detecting the labeled molecule in the subject, such that detection of labeled molecule above the background level indicates that the subject has a particular disease or disorder associated with aberrant expression of the polypeptide of interest. Background level can be determined by various methods including, comparing the amount of labeled molecule detected to a standard value previously determined for a particular system.

[0315] It will be understood in the art that the size of the subject and the imaging system used will determine the quantity of imaging moiety needed to produce diagnostic images. In the case of a radioisotope moiety, for a human subject, the quantity of radioactivity injected will normally range from about 5 to 20 millicuries of 99 mTc. The labeled antibody or antibody fragment will then preferentially accumulate at the location of cells which contain the specific protein. In vivo tumor imaging is described in S. W. Burchiel et al., “Immunopharmacokinetics of Radiolabeled Antibodies and Their Fragments.” (Chapter 13 in Tumor Imaging: The Radiochemical Detection of Cancer, S. W. Burchiel and B. A. Rhodes, eds., Masson Publishing Inc. (1982)).

[0316] Depending on several variables, including the type of label used and the mode of administration, the time interval following the administration for permitting the labeled molecule to preferentially concentrate at sites in the subject and for unbound labeled molecule to be cleared to background level is 6 to 48 hours or 6 to 24 hours or 6 to 12 hours. In another embodiment the time interval following administration is 5 to 20 days or 5 to 10 days.

[0317] In an embodiment, monitoring of the disease or disorder is carried out by repeating the method for diagnosing the disease or disease, for example, one month after initial diagnosis, six months after initial diagnosis, one year after initial diagnosis, etc.

[0318] Presence of the labeled molecule can be detected in the patient using methods known in the art for in vivo scanning. These methods depend upon the type of label used. Skilled artisans will be able to determine the appropriate method for detecting a particular label. Methods and devices that may be used in the diagnostic methods of the invention include, but are not limited to, computed tomography (CT), whole body scan such as position emission tomography (PET), magnetic resonance imaging (MRI), and sonography.

[0319] In a specific embodiment, the molecule is labeled with a radioisotope and is detected in the patient using a radiation responsive surgical instrument (Thurston et al., U.S. Pat. No. 5,441,050). In another embodiment, the molecule is labeled with a fluorescent compound and is detected in the patient using a fluorescence responsive scanning instrument. In another embodiment, the molecule is labeled with a positron emitting metal and is detected in the patent using positron emission-tomography. In yet another embodiment, the molecule is labeled with a paramagnetic label and is detected in a patient using magnetic resonance imaging (MRI).

### Kits

[0320] The present invention provides kits that can be used in the above methods. In one embodiment, a kit comprises an antibody of the invention, preferably a purified antibody, in one or more containers. In a specific embodiment, the kits of the present invention contain a substantially isolated polypeptide comprising an epitope which is specifically immunoreactive with an antibody included in the kit. Preferably, the kits of the present invention further comprise a control antibody which does not react with the polypeptide of interest. In another specific embodiment, the kits of the present invention contain a means for detecting the binding of an antibody to a polypeptide of interest (e.g., the antibody may be conjugated to a detectable substrate such as a fluorescent compound, an enzymatic substrate, a radioactive compound or a luminescent compound, or a second antibody which recognizes the first antibody may be conjugated to a detectable substrate).

[0321] In another specific embodiment of the present invention, the kit is a diagnostic kit for use in screening serum containing antibodies specific against proliferative and/or cancerous polynucleotides and polypeptides. Such a kit may include a control antibody that does not react with the polypeptide of interest. Such a kit may include a substantially isolated polypeptide antigen comprising an epitope which is specifically immunoreactive with at least one anti-polypeptide antigen antibody. Further, such a kit includes means for detecting the binding of said antibody to the antigen (e.g., the antibody may be conjugated to a fluorescent compound such as fluorescein or rhodamine which can be detected by flow cytometry). In specific embodiments, the kit may include a recombinantly produced or chemically synthesized polypeptide antigen. The polypeptide antigen of the kit may also be attached to a solid support.

[0322] In a more specific embodiment the detecting means of the above-described kit includes a solid support to which said polypeptide antigen is attached. Such a kit may also include a non-attached reporter-labeled anti-human antibody. In this embodiment, binding of the antibody to the polypeptide antigen can be detected by binding of the said reporter-labeled antibody.

[0323] In an additional embodiment, the invention includes a diagnostic kit for use in screening serum containing antigens of the polypeptide of the invention. The diagnostic kit includes a substantially isolated antibody specifically immunoreactive with polypeptide or polynucleotide antigens, and means for detecting the binding of the polynucleotide or polypeptide antigen to the antibody. In one embodiment, the antibody is attached to a solid support. In a specific embodiment, the antibody may be a monoclonal antibody. The detecting means of the kit may include a second, labeled monoclonal antibody. Alternatively, or in addition, the detecting means may include a labeled, competing antigen.

[0324] In one diagnostic configuration, test serum is reacted with a solid phase reagent having a surface-bound antigen obtained by the methods of the present invention. After binding with specific antigen antibody to the reagent and removing unbound serum components by washing, the reagent is reacted with reporter-labeled anti-human antibody to bind reporter to the reagent in proportion to the amount of bound anti-antigen antibody on the solid support. The reagent is again washed to remove unbound labeled antibody, and the amount of reporter associated with the reagent is determined. Typically, the reporter is an enzyme which is detected by incubating the solid phase in the presence of a suitable fluorometric, luminescent or colorimetric substrate (Sigrna, St. Louis, Mo.).

[0325] The solid surface reagent in the above assay is prepared by known techniques for attaching protein material to solid support material, such as polymeric beads, dip sticks, 96-well plate or filter material. These attachment methods generally include non-specific adsorption of the protein to the support or covalent attachment of the protein, typically through a free amine group, to a chemically reactive group on the solid support, such as an activated carboxyl, hydroxyl, or aldehyde group. Alternatively, streptavidin coated plates can be used in conjunction with biotinylated antigen(s).

[0326] Thus, the invention provides an assay system or kit for carrying out this diagnostic method. The kit generally includes a support with surface- bound recombinant antigens, and a reporter-labeled anti-human antibody for detecting surface-bound anti-antigen antibody.

### Uses of the Polynucleotides

[0327] Each of the polynucleotides identified herein can be used in numerous ways as reagents. The following description should be considered exemplary and utilizes known techniques.

[0328] The polynucleotides of the present invention are useful for chromosome identification. There exists an ongoing need to identify new chromosome markers, since few chromosome marking reagents, based on actual sequence data (repeat polymorphisms), are presently available. Each sequence is specifically targeted to and can hybridize with a particular location on an individual human chromosome, thus each polynucleotide of the present invention can routinely be used as a chromosome marker using techniques known in the art. Table 1A, column 9 provides the chromosome location of some of the polynucleotides of the invention.

[0329] Briefly, sequences can be mapped to chromosomes by preparing PCR primers (preferably at least 15 bp (e.g., 15-25 bp) from the sequences shown in SEQ ID NO:X. Primers can optionally be selected using computer analysis so that primers do not span more than one predicted exon in the genomic DNA. These primers are then used for PCR screening of somatic cell hybrids containing individual human chromosomes. Only those hybrids containing the human gene corresponding to SEQ ID NO:X will yield an amplified fragment.

[0330] Similarly, somatic hybrids provide a rapid method of PCR mapping the polynucleotides to particular chromosomes. Three or more clones can be assigned per day using a single thermal cycler. Moreover, sublocalization of the polynucleotides can be achieved with panels of specific chromosome fragments. Other gene mapping strategies that can be used include in situ hybridization, prescreening with labeled flow-sorted chromosomes, preselection by hybridization to construct chromosome specific-cDNA libraries, and computer mapping techniques (See, e.g., Shuler, Trends Biotechnol 16:456-459 (1998) which is hereby incorporated by reference in its entirety).

[0331] Precise chromosomal location of the polynucleotides can also be achieved using fluorescence in situ hybridization (FISH) of a metaphase chromosomal spread. This technique uses polynucleotides as short as 500 or 600 bases; however, polynucleotides 2,000-4,000 bp are preferred. For a review of this technique, see Verma et al., “Human Chromosomes: a Manual of Basic Techniques,” Pergamon Press, New York (1988).

[0332] For chromosome mapping, the polynucleotides can be used individually (to mark a single chromosome or a single site on that chromosome) or in panels (for marking multiple sites and/or multiple chromosomes).

[0333] Thus, the present invention also provides a method for chromosomal localization which involves (a) preparing PCR primers from the polynucleotide sequences in Table 1A and/or Table 2 and SEQ ID NO:X and (b) screening somatic cell hybrids containing individual chromosomes.

[0334] The polynucleotides of the present invention would likewise be useful for radiation hybrid mapping, HAPPY mapping, and long range restriction mapping. For a review of these techniques and others known in the art, see, e.g. Dear, “Genome Mapping: A Practical Approach,” IRL Press at Oxford University Press, London (1997); Aydin, J. Mol. Med. 77:691-694 (1999); Hacia et al., Mol. Psychiatry 3:483-492 (1998); Herrick et al., Chromosome Res. 7:409-423 (1999); Hamilton et al., Methods Cell Biol. 62:265-280 (2000); and/or Ott, J. Hered. 90:68-70 (1999) each of which is hereby incorporated by reference in its entirety.

[0335] Once a polynucleotide has been mapped to a precise chromosomal location, the physical position of the polynucleotide can be used in linkage analysis. Linkage analysis establishes coinheritance between a chromosomal location and presentation of a particular disease. (Disease mapping data are found, for example, in V. McKusick, Mendelian Inheritance in Man (available on line through Johns Hopkins University Welch Medical Library)). Column 10 of Table 1A provides an OMIM reference identification number of diseases associated with the cytologic band disclosed in column 9 of Table 1A, as determined using techniques described herein and by reference to Table 5. Assuming 1 megabase mapping resolution and one gene per 20 kb, a cDNA precisely localized to a chromosomal region associated with the disease could be one of 50-500 potential causative genes.

[0336] Thus, once coinheritance is established, differences in a polynucleotide of the invention and the corresponding gene between affected and unaffected individuals can be examined. First, visible structural alterations in the chromosomes, such as deletions or translocations, are examined in chromosome spreads or by PCR. If no structural alterations exist, the presence of point mutations are ascertained. Mutations observed in some or all affected individuals, but not in normal individuals, indicates that the mutation may cause the disease. However, complete sequencing of the polypeptide and the corresponding gene from several normal individuals is required to distinguish the mutation from a polymorphism. If a new polymorphism is identified, this polymorphic polypeptide can be used for further linkage analysis.

[0337] Furthermore, increased or decreased expression of the gene in affected individuals as compared to unaffected individuals can be assessed using the polynucleotides of the invention. Any of these alterations (altered expression, chromosomal rearrangement, or mutation) can be used as a diagnostic or prognostic marker. Diagnostic and prognostic methods, kits and reagents encompassed by the present invention are briefly described below and more thoroughly elsewhere herein (see e.g., the sections labeled “Antibodies”, “Diagnostic Assays”, and “Methods for Detecting Diseases”).

[0338] Thus, the invention also provides a diagnostic method useful during diagnosis of a disorder, involving measuring the expression level of polynucleotides of the present invention in cells or body fluid from an individual and comparing the measured gene expression level with a standard level of polynucleotide expression level, whereby an increase or decrease in the gene expression level compared to the standard is indicative of a disorder. Additional non-limiting examples of diagnostic methods encompassed by the present invention are more thoroughly described elsewhere herein (see, e.g., Example 12).

[0339] In still another embodiment, the invention includes a kit for analyzing samples for the presence of proliferative and/or cancerous polynucleotides derived from a test subject. In a general embodiment, the kit includes at least one polynucleotide probe containing a nucleotide sequence that will specifically hybridize with a polynucleotide of the invention and a suitable container. In a specific embodiment, the kit includes two polynucleotide probes defining an internal region of the polynucleotide of the invention, where each probe has one strand containing a 31′mer-end internal to the region. In a further embodiment, the probes may be useful as primers for polymerase chain reaction amplification.

[0340] Where a diagnosis of a related disorder, including, for example, diagnosis of a tumor, has already been made according to conventional methods, the present invention is useful as a prognostic indicator, whereby patients exhibiting enhanced or depressed polynucleotide of the invention expression will experience a worse clinical outcome relative to patients expressing the gene at a level nearer the standard level.

[0341] By “measuring the expression level of polynucleotides of the invention” is intended qualitatively or quantitatively measuring or estimating the level of the polypeptide of the invention or the level of the mRNA encoding the polypeptide of the invention in a first biological sample either directly (e.g., by determining or estimating absolute protein level or mRNA level) or relatively (e.g., by comparing to the polypeptide level or mRNA level in a second biological sample). Preferably, the polypeptide level or mRNA level in the first biological sample is measured or estimated and compared to a standard polypeptide level or mRNA level, the standard being taken from a second biological sample obtained from an individual not having the related disorder or being determined by averaging levels from a population of individuals not having a related disorder. As will be appreciated in the art, once a standard polypeptide level or mRNA level is known, it can be used repeatedly as a standard for comparison.

[0342] By “biological sample” is intended any biological sample obtained from an individual, body fluid, cell line, tissue culture, or other source which contains polypeptide of the present invention or the corresponding mRNA. As indicated, biological samples include body fluids (such as semen, lymph, vaginal pool, sera, plasma, urine, synovial fluid and spinal fluid) which contain the polypeptide of the present invention, and tissue sources found to express the polypeptide of the present invention. Methods for obtaining tissue biopsies and body fluids from mammals are well known in the art. Where the biological sample is to include mRNA, a tissue biopsy is the preferred source.

[0343] The method(s) provided above may preferably be applied in a diagnostic method and/or kits in which polynucleotides and/or polypeptides of the invention are attached to a solid support. In one exemplary method, the support may be a “gene chip” or a “biological chip” as described in U.S. Pat. Nos. 5,837,832, 5,874,219, and 5,856,174. Further, such a gene chip with polynucleotides of the invention attached may be used to identify polymorphisms between the isolated polynucleotide sequences of the invention, with polynucleotides isolated from a test subject. The knowledge of such polymorphisms (i.e. their location, as well as, their existence) would be beneficial in identifying disease loci for many disorders, such as for example, in neural disorders, immune system disorders, muscular disorders, reproductive disorders, gastrointestinal disorders, pulmonary disorders, digestive disorders, metabolic disorders, cardiovascular disorders, renal disorders, proliferative disorders, and/or cancerous diseases and conditions. Such a method is described in U.S. Pat. Nos. 5,858,659 and 5,856,104. The US Patents referenced supra are hereby incorporated by reference in their entirety herein.

[0344] The present invention encompasses polynucleotides of the present invention that are chemically synthesized, or reproduced as peptide nucleic acids (PNA), or according to other methods known in the art. The use of PNAs would serve as the preferred form if the polynucleotides of the invention are incorporated onto a solid support, or gene chip. For the purposes of the present invention, a peptide nucleic acid (PNA) is a polyamide type of DNA analog and the monomeric units for adenine, guanine, thymine and cytosine are available commercially (Perceptive Biosystems). Certain components of DNA, such as phosphorus, phosphorus oxides, or deoxyribose derivatives, are not present in PNAs. As disclosed by Nielsen et al., Science 254, 1497 (1991); and Egholm et al., Nature 365, 666 (1993), PNAs bind specifically and tightly to complementary DNA strands and are not degraded by nucleases. In fact, PNA binds more strongly to DNA than DNA itself does. This is probably because there is no electrostatic repulsion between the two strands, and also the polyamide backbone is more flexible. Because of this, PNA/DNA duplexes bind under a wider range of stringency conditions than DNA/DNA duplexes, making it easier to perform multiplex hybridization. Smaller probes can be used than with DNA due to the strong binding. In addition, it is more likely that single base mismatches can be determined with PNA/DNA hybridization because a single mismatch in a PNA/DNA 15-mer lowers the melting point (T.sub.m) by 8°-20° C., vs. 4°-16° C. for the DNA/DNA 15-mer duplex. Also, the absence of charge groups in PNA means that hybridization can be done at low ionic strengths and reduce possible interference by salt during the analysis.

[0345] The compounds of the present invention have uses which include, but are not limited to, detecting cancer in mammals. In particular the invention is useful during diagnosis of pathological cell proliferative neoplasias which include, but are not limited to: acute myelogenous leukemias including acute monocytic leukemia, acute myeloblastic leukemia, acute promyelocytic leukemia, acute myelomonocytic leukemia, acute erythroleukemia, acute megakaryocytic leukemia, and acute undifferentiated leukemia, etc.; and chronic myelogenous leukemias including chronic myelomonocytic leukemia, chronic granulocytic leukemia, etc. Preferred mammals include monkeys, apes, cats, dogs, cows, pigs, horses, rabbits and humans. Particularly preferred are humans.

[0346] Pathological cell proliferative disorders are often associated with inappropriate activation of proto-oncogenes. (Gelmann, E. P. et al., “The Etiology of Acute Leukemia: Molecular Genetics and Viral Oncology,” in Neoplastic Diseases of the Blood, Vol 1., Wiernik, P. H. et al. eds., 161-182 (1985)). Neoplasias are now believed to result from the qualitative alteration of a normal cellular gene product, or from the quantitative modification of gene expression by insertion into the chromosome of a viral sequence, by chromosomal translocation of a gene to a more actively transcribed region, or by some other mechanism. (Gelmann et al., supra) It is likely that mutated or altered expression of specific genes is involved in the pathogenesis of some leukemias, among other tissues and cell types. (Gelmann et al., supra) Indeed, the human counterparts of the oncogenes involved in some animal neoplasias have been amplified or translocated in some cases of human leukemia and carcinoma. (Gelmann et al., supra)

[0347] For example, c-myc expression is highly amplified in the non-lymphocytic leukemia cell line HL-60. When HL-60 cells are chemically induced to stop proliferation, the level of c-myc is found to be downregulated. (International Publication Number WO 91/15580). However, it has been shown that exposure of HL-60 cells to a DNA construct that is complementary to the 5′ end of c-myc or c-myb blocks translation of the corresponding mRNAs which downregulates expression of the c-myc or c-myb proteins and causes arrest of cell proliferation and differentiation of the treated cells. (International Publication Number WO 91/15580; Wickstrom et al., Proc. Natl. Acad. Sci. 85:1028 (1988); Anfossi et al., Proc. Natl. Acad. Sci. 86:3379 (1989)). However, the skilled artisan would appreciate the present invention's usefulness is not be limited to treatment, prevention, and/or prognosis of proliferative disorders of cells and tissues of hematopoietic origin, in light of the numerous cells and cell types of varying origins which are known to exhibit proliferative phenotypes.

[0348] In addition to the foregoing, a polynucleotide of the present invention can be used to control gene expression through triple helix formation or through antisense DNA or RNA. Antisense techniques are discussed, for example, in Okano, J. Neurochem. 56: 560 (1991); “Oligodeoxynucleotides as Antisense Inhibitors of Gene Expression, CRC Press, Boca Raton, Fla. (1988). Triple helix formation is discussed in, for instance Lee et al., Nucleic Acids Research 6: 3073 (1979); Cooney et al., Science 241: 456 (1988); and Dervan et al., Science 251: 1360 (1991). Both methods rely on binding of the polynucleotide to a complementary DNA or RNA. For these techniques, preferred polynucleotides are usually oligonucleotides 20 to 40 bases in length and complementary to either the region of the gene involved in transcription (triple helix—see Lee et al., Nucl. Acids Res. 6:3073 (1979); Cooney et al., Science 241:456 (1988); and Dervan et al., Science 251:1360 (1991)) or to the mRNA itself (antisense—Okano, J. Neurochem. 56:560 (1991); Oligodeoxy-nucleotides as Antisense Inhibitors of Gene Expression, CRC Press, Boca Raton, Fla. (1988)). Triple helix formation optimally results in a shut-off of RNA transcription from DNA, while antisense RNA hybridization blocks translation of an mRNA molecule into polypeptide. The oligonucleotide described above can also be delivered to cells such that the antisense RNA or DNA may be expressed in vivo to inhibit production of polypeptide of the present invention antigens. Both techniques are effective in model systems, and the information disclosed herein can be used to design antisense or triple helix polynucleotides in an effort to treat disease, and in particular, for the treatment of proliferative diseases and/or conditions. Non-limiting antisense and triple helix methods encompassed by the present invention are more thoroughly described elsewhere herein (see, e.g., the section labeled “Antisense and Ribozyme (Antagonists)”).

[0349] Polynucleotides of the present invention are also useful in gene therapy. One goal of gene therapy is to insert a normal gene into an organism having a defective gene, in an effort to correct the genetic defect. The polynucleotides disclosed in the present invention offer a means of targeting such genetic defects in a highly accurate manner. Another goal is to insert a new gene that was not present in the host genome, thereby producing a new trait in the host cell. Additional non-limiting examples of gene therapy methods encompassed by the present invention are more thoroughly described elsewhere herein (see, e.g., the sections labeled “Gene Therapy Methods”, and Examples 16, 17 and 18).

[0350] The polynucleotides are also useful for identifying individuals from minute biological samples. The United States military, for example, is considering the use of restriction fragment length polymorphism (RFLP) for identification of its personnel. In this technique, an individual's genomic DNA is digested with one or more restriction enzymes, and probed on a Southern blot to yield unique bands for identifying personnel. This method does not suffer from the current limitations of “Dog Tags” which can be lost, switched, or stolen, making positive identification difficult. The polynucleotides of the present invention can be used as additional DNA markers for RFLP.

[0351] The polynucleotides of the present invention can also be used as an alternative to RFLP, by determining the actual base-by-base DNA sequence of selected portions of an individual's genome. These sequences can be used to prepare PCR primers for amplifying and isolating such selected DNA, which can then be sequenced. Using this technique, individuals can be identified because each individual will have a unique set of DNA sequences. Once an unique ID database is established for an individual, positive identification of that individual, living or dead, can be made from extremely small tissue samples.

[0352] Forensic biology also benefits from using DNA-based identification techniques as disclosed herein. DNA sequences taken from very small biological samples such as tissues, e.g., hair or skin, or body fluids, e.g., blood, saliva, semen, synovial fluid, amniotic fluid, breast milk, lymph, pulmonary sputum or surfactant, urine, fecal matter, etc., can be amplified using PCR. In one prior art technique, gene sequences amplified from polymorphic loci, such as DQa class II HLA gene, are used in forensic biology to identify individuals. (Erlich, H., PCR Technology, Freeman and Co. (1992)). Once these specific polymorphic loci are amplified, they are digested with one or more restriction enzymes, yielding an identifying set of bands on a Southern blot probed with DNA corresponding to the DQa class II HLA gene. Similarly, polynucleotides of the present invention can be used as polymorphic markers for forensic purposes.

[0353] There is also a need for reagents capable of identifying the source of a particular tissue. Such need arises, for example, in forensics when presented with tissue of unknown origin. Appropriate reagents can comprise, for example, DNA probes or primers prepared from the sequences of the present invention, specific to tissues, including but not limited to those shown in Table 1A. Panels of such reagents can identify tissue by species and/or by organ type. In a similar fashion, these reagents can be used to screen tissue cultures for contamination. Additional non-limiting examples of such uses are further described herein.

[0354] The polynucleotides of the present invention are also useful as hybridization probes for differential identification of the tissue(s) or cell type(s) present in a biological sample. Similarly, polypeptides and antibodies directed to polypeptides of the present invention are useful to provide immunological probes for differential identification of the tissue(s) (e.g., immunohistochemistry assays) or cell type(s) (e.g., immunocytochemistry assays). In addition, for a number of disorders of the above tissues or cells, significantly higher or lower levels of gene expression of the polynucleotides/polypeptides of the present invention may be detected in certain tissues (e.g., tissues expressing polypeptides and/or polynucleotides of the present invention, for example, those disclosed in column 8 of Table 1A, and/or cancerous and/or wounded tissues) or bodily fluids (e.g., semen, lymph, vaginal pool, serum, plasma, urine, synovial fluid or spinal fluid) taken from an individual having such a disorder, relative to a “standard” gene expression level, i.e., the expression level in healthy tissue from an individual not having the disorder.

[0355] Thus, the invention provides a diagnostic method of a disorder, which involves: (a) assaying gene expression level in cells or body fluid of an individual; (b) comparing the gene expression level with a standard gene expression level, whereby an increase or decrease in the assayed gene expression level compared to the standard expression level is indicative of a disorder.

[0356] In the very least, the polynucleotides of the present invention can be used as molecular weight markers on Southern gels, as diagnostic probes for the presence of a specific mRNA in a particular cell type, as a probe to “subtract-out” known sequences in the process of discovering novel polynucleotides, for selecting and making oligomers for attachment to a “gene chip” or other support, to raise anti-DNA antibodies using DNA immunization techniques, and as an antigen to elicit an immune response.

### Uses of the Polypeptides

[0357] Each of the polypeptides identified herein can be used in numerous ways. The following description should be considered exemplary and utilizes known techniques.

[0358] Polypeptides and antibodies directed to polypeptides of the present invention are useful to provide immunological probes for differential identification of the tissue(s) (e.g., immunohistochemistry assays such as, for example, ABC immunoperoxidase (Hsu et al., J. Histochem. Cytochem. 29:577-580 (1981)) or cell type(s) (e.g., immunocytochemistry assays).

[0359] Antibodies can be used to assay levels of polypeptides encoded by polynucleotides of the invention in a biological sample using classical immunohistological methods known to those of skill in the art (e.g., see Jalkanen, et al., J. Cell. Biol. 101:976-985 (1985); Jalkanen, et al., J. Cell. Biol. 105:3087-3096 (1987)). Other antibody-based methods useful for detecting protein gene expression include immunoassays, such as the enzyme linked immunosorbent assay (ELISA) and the radioimmunoassay (RIA). Suitable antibody assay labels are known in the art and include enzyme labels, such as, glucose oxidase; radioisotopes, such as iodine (¹³¹I, ¹²⁵I, ¹²³I, ¹²¹I), carbon (¹⁴C), sulfur (³⁵S), tritium (³H), indium (^{115m}In, ^{113m}In, ¹¹²In, ¹¹¹In), and technetium (⁹⁹Tc, ^{99m}Tc), thallium (²⁰¹Ti), gallium (⁶⁸Ga, ⁶⁷Ga), palladium (¹⁰³Pd), molybdenum (⁹⁹Mo), xenon (¹³³Xe), fluorine (¹⁸F), ¹⁵³Sm ¹⁷⁷Lu, ¹⁵⁹Gd, ¹⁴⁹Pm, ¹⁴⁰La, ¹⁷⁵Yb, ¹⁶⁶Ho, ⁹⁰Y, ⁴⁷Sc, ¹⁸⁶Re, ¹⁸⁸Re, ¹⁴²Pr, ¹⁰⁵Rh, ⁹⁷Ru; luminescent labels, such as luminol; and fluorescent labels, such as fluorescein and rhodamine, and biotin.

[0360] In addition to assaying levels of polypeptide of the present invention in a biological sample, proteins can also be detected in vivo by imaging. Antibody labels or markers for in vivo imaging of protein include those detectable by X-radiography, NMR or ESR. For X-radiography, suitable labels include radioisotopes such as barium or cesium, which emit detectable radiation but are not overtly harmful to the subject. Suitable markers for NMR and ESR include those with a detectable characteristic spin, such as deuterium, which may be incorporated into the antibody by labeling of nutrients for the relevant hybridoma.

[0361] A protein-specific antibody or antibody fragment which has been labeled with an appropriate detectable imaging moiety, such as a radioisotope (for example, ¹³¹I, ¹¹²In, ^{99m}Tc, (¹³¹I, ¹²⁵I, ¹²³I, ¹²¹I), carbon (¹⁴C), sulfer (³⁵S), tritium (³H), indium (^{115m}In, ^{113m}In, ¹¹²In, ¹¹¹In), and technetium (⁹⁹Tc, ^{99m}Tc), thallium (²⁰¹Ti), gallium (⁶⁸Ga, ⁶⁷Ga), palladium (¹⁰³Pd), molybdenum (⁹⁹Mo), xenon (¹³³Xe), fluorine (¹⁸F, ¹⁵³Sm, ¹⁷⁷Lu, ¹⁵⁹Gd, ¹⁴⁹Pm, ¹⁴⁰La, ¹⁷⁵Yb, ¹⁶⁶Ho, ⁹⁰Y, ⁴⁷Sc, ¹⁸⁶Re, ¹⁸⁸Re, ¹⁴²Pr, ¹⁰⁵Rh, ⁹⁷Ru), a radio-opaque substance, or a material detectable by nuclear magnetic resonance, is introduced (for example, parenterally, subcutaneously or intraperitoneally) into the mammal to be examined for immune system disorder. It will be understood in the art that the size of the subject and the imaging system used will determine the quantity of imaging moiety needed to produce diagnostic images. In the case of a radioisotope moiety, for a human subject, the quantity of radioactivity injected will normally range from about 5 to 20 millicuries of ^{99m}Tc. The labeled antibody or antibody fragment will then preferentially accumulate at the location of cells which express the polypeptide encoded by a polynucleotide of the invention. In vivo tumor imaging is described in S. W. Burchiel et al., ”Immunopharmacokinetics of Radiolabeled Antibodies and Their Fragments” (Chapter 13 in Tumor Imaging: The Radiochemical Detection of Cancer, S. W. Burchiel and B. A. Rhodes, eds., Masson Publishing Inc. (1982)).

[0362] In one embodiment, the invention provides a method for the specific delivery of compositions of the invention to cells by administering polypeptides of the invention (e.g., polypeptides encoded by polynucleotides of the invention and/or antibodies) that are associated with heterologous polypeptides or nucleic acids. In one example, the invention provides a method for delivering a therapeutic protein into the targeted cell. In another example, the invention provides a method for delivering a single stranded nucleic acid (e.g., antisense or ribozymes) or double stranded nucleic acid (e.g., DNA that can integrate into the cell's genome or replicate episomally and that can be transcribed) into the targeted cell.

[0363] In another embodiment, the invention provides a method for the specific destruction of cells (e.g., the destruction of tumor cells) by administering polypeptides of the invention in association with toxins or cytotoxic prodrugs.

[0364] By “toxin” is meant one or more compounds that bind and activate endogenous cytotoxic effector systems, radioisotopes, holotoxins, modified toxins, catalytic subunits of toxins, or any molecules or enzymes not normally present in or on the surface of a cell that under defined conditions cause the cell's death. Toxins that may be used according to the methods of the invention include, but are not limited to, radioisotopes known in the art, compounds such as, for example, antibodies (or complement fixing containing portions thereof) that bind an inherent or induced endogenous cytotoxic effector system, thymidine kinase, endonuclease, RNAse, alpha toxin, ricin, abrin, Pseudomonas exotoxin A, diphtheria toxin, saporin, momordin, gelonin, pokeweed antiviral protein, alpha-sarcin and cholera toxin. “Toxin” also includes a cytostatic or cytocidal agent, a therapeutic agent or a radioactive metal ion, e.g., alpha-emitters such as, for example, ²¹³Bi, or other radioisotopes such as, for example, ¹⁰³Pd, ¹³³Xe, ¹³¹I, ⁶⁸Ge, ⁵⁷Co, ⁶⁵Zn, ⁸⁵Sr, ³²P, ³⁵S, ⁹⁰Y, ¹⁵³Sm, ¹⁵³Gd, ¹⁶⁹Yb, ⁵¹Cr, ⁵⁴Mn, ⁷⁵Se, ¹¹³Sn, ⁹⁰Yttrium, ¹¹⁷Tin, ¹⁸⁶Rhenium, ¹⁶⁶Holmium, and ¹⁸⁸Rhenium; luminescent labels, such as luminol; and fluorescent labels, such as fluorescein and rhodamine, and biotin. In a specific embodiment, the invention provides a method for the specific destruction of cells (e.g., the destruction of tumor cells) by administering polypeptides of the invention or antibodies of the invention in association with the radioisotope ⁹⁰Y. In another specific embodiment, the invention provides a method for the specific destruction of cells (e.g., the destruction of tumor cells) by administering polypeptides of the invention or antibodies of the invention in association with the radioisotope ¹¹¹In. In a further specific embodiment, the invention provides a method for the specific destruction of cells (e.g., the destruction of tumor cells) by administering polypeptides of the invention or antibodies of the invention in association with the radioisotope ¹³¹I.

[0365] Techniques known in the art may be applied to label polypeptides of the invention (including antibodies). Such techniques include, but are not limited to, the use of bifunctional conjugating agents (see e.g., U.S. Pat. Nos. 5,756,065; 5,714,631; 5,696,239; 5,652,361; 5,505,931; 5,489,425; 5,435,990; 5,428,139; 5,342,604; 5,274,119; 4,994,560; and 5,808,003; the contents of each of which are hereby incorporated by reference in its entirety).

[0366] Thus, the invention provides a diagnostic method of a disorder, which involves (a) assaying the expression level of a polypeptide of the present invention in cells or body fluid of an individual; and (b) comparing the assayed polypeptide expression level with a standard polypeptide expression level, whereby an increase or decrease in the assayed polypeptide expression level compared to the standard expression level is indicative of a disorder. With respect to cancer, the presence of a relatively high amount of transcript in biopsied tissue from an individual may indicate a predisposition for the development of the disease, or may provide a means for detecting the disease prior to the appearance of actual clinical symptoms. A more definitive diagnosis of this type may allow health professionals to employ preventative measures or aggressive treatment earlier thereby preventing the development or further progression of the cancer.

[0367] Moreover, polypeptides of the present invention can be used to treat or prevent diseases or conditions such as, for example, neural disorders, immune system disorders, muscular disorders, reproductive disorders, gastrointestinal disorders, pulmonary disorders, cardiovascular disorders, renal disorders, proliferative disorders, and/or cancerous diseases and conditions. For example, patients can be administered a polypeptide of the present invention in an effort to replace absent or decreased levels of the polypeptide (e.g., insulin), to supplement absent or decreased levels of a different polypeptide (e.g., hemoglobin S for hemoglobin B, SOD, catalase, DNA repair proteins), to inhibit the activity of a polypeptide (e.g., an oncogene or tumor supressor), to activate the activity of a polypeptide (e.g., by binding to a receptor), to reduce the activity of a membrane bound receptor by competing with it for free ligand (e.g., soluble TNF receptors used in reducing inflammation), or to bring about a desired response (e.g., blood vessel growth inhibition, enhancement of the immune response to proliferative cells or tissues).

[0368] Similarly, antibodies directed to a polypeptide of the present invention can also be used to treat disease (as described supra, and elsewhere herein). For example, administration of an antibody directed to a polypeptide of the present invention can bind, and/or neutralize the polypeptide, and/or reduce overproduction of the polypeptide. Similarly, administration of an antibody can activate the polypeptide, such as by binding to a polypeptide bound to a membrane (receptor).

[0369] At the very least, the polypeptides of the present invention can be used as molecular weight markers on SDS-PAGE gels or on molecular sieve gel filtration columns using methods well known to those of skill in the art. Polypeptides can also be used to raise antibodies, which in turn are used to measure protein expression from a recombinant cell, as a way of assessing transformation of the host cell. Moreover, the polypeptides of the present invention can be used to test the biological activities described herein.

### Diagnostic Assays

[0370] The compounds of the present invention are useful for diagnosis, treatment, prevention and/or prognosis of various disorders in mammals, preferably humans. Such disorders include, but are not limited to, those described herein under the section heading “Biological Activities”.

[0371] For a number of disorders, substantially altered (increased or decreased) levels of gene expression can be detected in tissues, cells or bodily fluids (e.g., sera, plasma, urine, semen, synovial fluid or spinal fluid) taken from an individual having such a disorder, relative to a “standard” gene expression level, that is, the expression level in tissues or bodily fluids from an individual not having the disorder. Thus, the invention provides a diagnostic method useful during diagnosis of a disorder, which involves measuring the expression level of the gene encoding the polypeptide in tissues, cells or body fluid from an individual and comparing the measured gene expression level with a standard gene expression level, whereby an increase or decrease in the gene expression level(s) compared to the standard is indicative of a disorder. These diagnostic assays may be performed in vivo or in vitro, such as, for example, on blood samples, biopsy tissue or autopsy tissue.

[0372] The present invention is also useful as a prognostic indicator, whereby patients exhibiting enhanced or depressed gene expression will experience a worse clinical outcome relative to patients expressing the gene at a level nearer the standard level.

[0373] In certain embodiments, a polypeptide of the invention, or polynucleotides, antibodies, agonists, or antagonists corresponding to that polypeptide, may be used to diagnose and/or prognose diseases and/or disorders associated with the tissue(s) in which the polypeptide of the invention is expressed, including one, two, three, four, five, or more tissues disclosed in Table 1A, column 8 (Tissue Distribution Library Code).

[0374] By “assaying the expression level of the gene encoding the polypeptide” is intended qualitatively or quantitatively measuring or estimating the level of the polypeptide of the invention or the level of the mRNA encoding the polypeptide of the invention in a first biological sample either directly (e.g., by determining or estimating absolute protein level or mRNA level) or relatively (e.g., by comparing to the polypeptide level or mRNA level in a second biological sample). Preferably, the polypeptide expression level or mRNA level in the first biological sample is measured or estimated and compared to a standard polypeptide level or mRNA level, the standard being taken from a second biological sample obtained from an individual not having the disorder or being determined by averaging levels from a population of individuals not having the disorder. As will be appreciated in the art, once a standard polypeptide level or mRNA level is known, it can be used repeatedly as a standard for comparison.

[0375] By “biological sample” is intended any biological sample obtained from an individual, cell line, tissue culture, or other source containing polypeptides of the invention (including portions thereof) or mRNA. As indicated, biological samples include body fluids (such as sera, plasma, urine, synovial fluid and spinal fluid) and tissue sources found to express the full length or fragments thereof of a polypeptide or mRNA. Methods for obtaining tissue biopsies and body fluids from mammals are well known in the art. Where the biological sample is to include mRNA, a tissue biopsy is the preferred source.

[0376] Total cellular RNA can be isolated from a biological sample using any suitable technique such as the single-step guanidinium-thiocyanate-phenol-chloroform method described in Chomczynski and Sacchi, Anal. Biochem. 162:156-159 (1987). Levels of mRNA encoding the polypeptides of the invention are then assayed using any appropriate method. These include Northern blot analysis, S1 nuclease mapping, the polymerase chain reaction (PCR), reverse transcription in combination with the polymerase chain reaction (RT-PCR), and reverse transcription in combination with the ligase chain reaction (RT-LCR).

[0377] The present invention also relates to diagnostic assays such as quantitative and diagnostic assays for detecting levels of polypeptides of the invention, in a biological sample (e.g., cells and tissues), including determination of normal and abnormal levels of polypeptides. Thus, for instance, a diagnostic assay in accordance with the invention for detecting over-expression of polypeptides of the invention compared to normal control tissue samples may be used to detect the presence of tumors. Assay techniques that can be used to determine levels of a polypeptide, such as a polypeptide of the present invention in a sample derived from a host are well-known to those of skill in the art. Such assay methods include radioimmunoassays, competitive-binding assays, Western Blot analysis and ELISA assays. Assaying polypeptide levels in a biological sample can occur using any art-known method.

[0378] Assaying polypeptide levels in a biological sample can occur using antibody-based techniques. For example, polypeptide expression in tissues can be studied with classical immunohistological methods (Jalkanen et al., J. Cell. Biol. 101:976-985 (1985); Jalkanen, M., et al., J. Cell . Biol. 105:3087-3096 (1987)). Other antibody-based methods useful for detecting polypeptide gene expression include immunoassays, such as the enzyme linked immunosorbent assay (ELISA) and the radioimmunoassay (RIA). Suitable antibody assay labels are known in the art and include enzyme labels, such as, glucose oxidase, and radioisotopes, such as iodine (¹²⁵I, ¹²¹I), carbon (¹⁴C), sulfur (³⁵S), tritium (³H), indium (¹¹²In), and technetium (^{99m}Tc), and fluorescent labels, such as fluorescein and rhodamine, and biotin.

[0379] The tissue or cell type to be analyzed will generally include those which are known, or suspected, to express the gene of inteest (such as, for example, cancer). The protein isolation methods employed herein may, for example, be such as those described in Harlow and Lane (Harlow, E. and Lane, D., 1988, “Antibodies: A Laboratory Manual”, Cold Spring Harbor Laboratory Press, Cold Spring Harbor, N.Y.), which is incorporated herein by reference in its entirety. The isolated cells can be derived from cell culture or from a patient. The analysis of cells taken from culture may be a necessary step in the assessment of cells that could be used as part of a cell-based gene therapy technique or, alternatively, to test the effect of compounds on the expression of the gene.

[0380] For example, antibodies, or fragments of antibodies, such as those described herein, may be used to quantitatively or qualitatively detect the presence of gene products or conserved variants or peptide fragments thereof. This can be accomplished, for example, by immunofluorescence techniques employing a fluorescently labeled antibody coupled with light microscopic, flow cytometric, or fluorimetric detection.

[0381] In a preferred embodiment, antibodies, or fragments of antibodies directed to any one or all of the predicted epitope domains of the polypeptides of the invention (shown in column 7 of Table 1A) may be used to quantitatively or qualitatively detect the presence of gene products or conserved variants or peptide fragments thereof. This can be accomplished, for example, by irununofluorescence techniques employing a fluorescently labeled antibody coupled with light microscopic, flow cytometric, or fluorimetric detection.

[0382] In an additional preferred embodiment, antibodies, or fragments of antibodies directed to a conformational epitope of a polypeptide of the invention may be used to quantitatively or qualitatively detect the presence of gene products or conserved variants or peptide fragments thereof. This can be accomplished, for example, by inmmunofluorescence techniques employing a fluorescently labeled antibody coupled with light microscopic, flow cytometric, or fluorimetric detection.

[0383] The antibodies (or fragments thereof), and/or polypeptides of the present invention may, additionally, be employed histologically, as in immunofluorescence, immunoelectron microscopy or non-immunological assays, for in situ detection of gene products or conserved variants or peptide fragments thereof. In situ detection may be accomplished by removing a histological specimen from a patient, and applying thereto a labeled antibody or polypeptide of the present invention. The antibody (or fragment thereof) or polypeptide is preferably applied by overlaying the labeled antibody (or fragment) onto a biological sample. Through the use of such a procedure, it is possible to determine not only the presence of the gene product, or conserved variants or peptide fragments, or polypeptide binding, but also its distribution in the examined tissue. Using the present invention, those of ordinary skill will readily perceive that any of a wide variety of histological methods (such as staining procedures) can be modified in order to achieve such in situ detection.

[0384] Immunoassays and non-immunoassays for gene products or conserved variants or peptide fragments thereof will typically comprise incubating a sample, such as a biological fluid, a tissue extract, freshly harvested cells, or lysates of cells which have been incubated in cell culture, in the presence of a detectably labeled antibody capable of binding gene products or conserved variants or peptide fragments thereof, and detecting the bound antibody by any of a number of techniques well-known in the art.

[0385] The biological sample may be brought in contact with and immobilized onto a solid phase support or carrier such as nitrocellulose, or other solid support which is capable of immobilizing cells, cell particles or soluble proteins. The support may then be washed with suitable buffers followed by treatment with the detectably labeled antibody or detectable polypeptide of the invention. The solid phase support may then be washed with the buffer a second time to remove unbound antibody or polypeptide. Optionally the antibody is subsequently labeled. The amount of bound label on solid support may then be detected by conventional means.

[0386] By “solid phase support or carrier” is intended any support capable of binding an antigen or an antibody. Well-known supports or carriers include glass, polystyrene, polypropylene, polyethylene, dextran, nylon, amylases, natural and modified celluloses, polyacrylamides, gabbros, and magnetite. The nature of the carrier can be either soluble to some extent or insoluble for the purposes of the present invention. The support material may have virtually any possible structural configuration so long as the coupled molecule is capable of binding to an antigen or antibody. Thus, the support configuration may be spherical, as in a bead, or cylindrical, as in the inside surface of a test tube, or the external surface of a rod. Alternatively, the surface may be flat such as a sheet, test strip, etc. Preferred supports include polystyrene beads. Those skilled in the art will know many other suitable carriers for binding antibody or antigen, or will be able to ascertain the same by use of routine experimentation.

[0387] The binding activity of a given lot of antibody or antigen polypeptide may be determined according to well known methods. Those skilled in the art will be able to determine operative and optimal assay conditions for each determination by employing routine experimentation.

[0388] In addition to assaying polypeptide levels or polynucleotide levels in a biological sample obtained from an individual, polypeptide or polynucleotide can also be detected in vivo by imaging. For example, in one embodiment of the invention, polypeptides and/or antibodies of the invention are used to image diseased cells, such as neoplasms. In another embodiment, polynucleotides of the invention (e.g., polynucleotides complementary to all or a portion of an mRNA) and/or antibodies (e.g., antibodies directed to any one or a combination of the epitopes of a polypeptide of the invention, antibodies directed to a conformational epitope of a polypeptide of the invention, or antibodies directed to the full length polypeptide expressed on the cell surface of a mammalian cell) are used to image diseased or neoplastic cells.

[0389] Antibody labels or markers for in vivo imaging of polypeptides of the invention include those detectable by X-radiography, NMR, MRI, CAT-scans or ESR. For X-radiography, suitable labels include radioisotopes such as barium or cesium, which emit detectable radiation but are not overtly harmful to the subject. Suitable markers for NMR and ESR include those with a detectable characteristic spin, such as deuterium, which may be incorporated into the antibody by labeling of nutrients for the relevant hybridoma. Where in vivo imaging is used to detect enhanced levels of polypeptides for diagnosis in humans, it may be preferable to use human antibodies or “humanized” chimeric monoclonal antibodies. Such antibodies can be produced using techniques described herein or otherwise known in the art. For example methods for producing chimeric antibodies are known in the art. See, for review, Morrison, Science 229:1202 (1985); Oi et al., BioTechniques 4:214 (1986); Cabilly et al., U.S. Pat. No. 4,816,567; Taniguchi et al., EP 171496; Morrison et al., EP 173494; Neuberger et al., WO 8601533; Robinson et al., WO 8702671; Boulianne et al., Nature 312:643 (1984); Neuberger et al., Nature 314:268 (1985).

[0390] Additionally, any polypeptides of the invention whose presence can be detected, can be administered. For example, polypeptides of the invention labeled with a radio-opaque or other appropriate compound can be administered and visualized in vivo, as discussed, above for labeled antibodies. Further, such polypeptides can be utilized for in vitro diagnostic procedures.

[0391] A polypeptide-specific antibody or antibody fragment which has been labeled with an appropriate detectable imaging moiety, such as a radioisotope (for example, ¹³¹I, ¹¹²In, ^{99m}Tc), a radio-opaque substance, or a material detectable by nuclear magnetic resonance, is introduced (for example, parenterally, subcutaneously or intraperitoneally) into the mammal to be examined for a disorder. It will be understood in the art that the size of the subject and the imaging system used will determine the quantity of imaging moiety needed to produce diagnostic images. In the case of a radioisotope moiety, for a human subject, the quantity of radioactivity injected will normally range from about 5 to 20 millicuries of ^{99m}Tc. The labeled antibody or antibody fragment will then preferentially accumulate at the location of cells which contain the antigenic protein. In vivo tumor imaging is described in S. W. Burchiel et al., “Immunopharmacokinetics of Radiolabeled Antibodies and Their Fragments” (Chapter 13 in Tumor Imaging: The Radiochemical Detection of Cancer, S. W. Burchiel and B. A. Rhodes, eds., Masson Publishing Inc. (1982)).

[0392] With respect to antibodies, one of the ways in which an antibody of the present invention can be detectably labeled is by linking the same to a reporter enzyme and using the linked product in an enzyme immunoassay (EIA) (Voller, A., “The Enzyme Linked Immunosorbent Assay (ELISA)”, 1978, Diagnostic Horizons 2:1-7, Microbiological Associates Quarterly Publication, Walkersville, Md.); Voller et al., J. Clin. Pathol. 31:507-520 (1978); Butler, J. E., Meth. Enzymol. 73:482-523 (1981); Maggio, E. (ed.), 1980, Enzyme Immunoassay, CRC Press, Boca Raton, Fla.,; Ishikawa, E. et al., (eds.), 1981, Enzyme Immunoassay, Kgaku Shoin, Tokyo). The reporter enzyme which is bound to the antibody will react with an appropriate substrate, preferably a chromogenic substrate, in such a manner as to produce a chemical moiety which can be detected, for example, by spectrophotometric, fluorimetric or by visual means. Reporter enzymes which can be used to detectably label the antibody include, but are not limited to, malate dehydrogenase, staphylococcal nuclease, delta-5-steroid isomerase, yeast alcohol dehydrogenase, alpha-glycerophosphate, dehydrogenase, triose phosphate isomerase, horseradish peroxidase, alkaline phosphatase, asparaginase, glucose oxidase, beta-galactosidase, ribonuclease, urease, catalase, glucose-6-phosate dehydrogenase, glucoamylase and acetylcholinesterase. Additionally, the detection can be accomplished by colorimetric methods which employ a chromogenic substrate for the reporter enzyme. Detection may also be accomplished by visual comparison of the extent of enzymatic reaction of a substrate in comparison with similarly prepared standards.

[0393] Detection may also be accomplished using any of a variety of other immunoassays. For example, by radioactively labeling the antibodies or antibody fragments, it is possible to detect polypeptides through the use of a radioimmunoassay (RIA) (see, for example, Weintraub, B., Principles of Radioimmunoassays, Seventh Training Course on Radioligand Assay Techniques, The Endocrine Society, March, 1986, which is incorporated by reference herein). The radioactive isotope can be detected by means including, but not limited to, a gamma counter, a scintillation counter, or autoradiography.

[0394] It is also possible to label the antibody with a fluorescent compound. When the fluorescently labeled antibody is exposed to light of the proper wave length, its presence can then be detected due to fluorescence. Among the most commonly used fluorescent labeling compounds are fluorescein isothiocyanate, rhodamine, phycoerythrin, phycocyanin, allophycocyanin, ophthaldehyde and fluorescamine.

[0395] The antibody can also be detectably labeled using fluorescence emitting metals such as ¹⁵²Eu, or others of the lanthanide series. These metals can be attached to the antibody using such metal chelating groups as diethylenetriaminepentacetic acid (DTPA) or ethylenediaminetetraacetic acid (EDTA).

[0396] The antibody also can be detectably labeled by coupling it to a chemiluminescent compound. The presence of the chemiluminescent-tagged antibody is then determined by detecting the presence of luminescence that arises during the course of a chemical reaction. Examples of particularly useful chemiluminescent labeling compounds are luminol, isoluminol, theromatic acridinium ester, imidazole, acridinium salt and oxalate ester.

[0397] Likewise, a bioluminescent compound may be used to label the antibody of the present invention. Bioluminescence is a type of chemiluminescence found in biological systems in, which a catalytic protein increases the efficiency of the chemiluminescent reaction. The presence of a bioluminescent protein is determined by detecting the presence of luminescence. Important bioluminescent compounds for purposes of labeling are luciferin, luciferase and acquorin.

### Methods for Detecting Diseases

[0398] In general, a disease may be detected in a patient based on the presence of one or more proteins of the invention and/or polynucleotides encoding such proteins in a biological sample (for example, blood, sera, urine, and/or tumor biopsies) obtained from the patient. In other words, such proteins may be used as markers to indicate the presence or absence of a disease or disorder, including cancer and/or as described elsewhere herein. In addition, such proteins may be useful for the detection of other diseases and cancers. The binding agents provided herein generally permit detection of the level of antigen that binds to the agent in the biological sample. Polynucleotide primers and probes may be used to detect the level of mRNA encoding polypeptides of the invention, which is also indicative of the presence or absence of a disease or disorder, including cancer. In general, polypeptides of the invention should be present at a level that is at least three fold higher in diseased tissue than in normal tissue.

[0399] There are a variety of assay formats known to those of ordinary skill in the art for using a binding agent to detect polypeptide markers in a sample. See, e.g., Harlow and Lane, supra. In general, the presence or absence of a disease in a patient may be determined by (a) contacting a biological sample obtained from a patient with a binding agent; (b) detecting in the sample a level of polypeptide that binds to the binding agent; and (c) comparing the level of polypeptide with a predetermined cut-off value.

[0400] In a preferred embodiment, the assay involves the use of a binding agent(s) immobilized on a solid support to bind to and remove the polypeptide of the invention from the remainder of the sample. The bound polypeptide may then be detected using a detection reagent that contains a reporter group and specifically binds to the binding agent/polypeptide complex. Such detection reagents may comprise, for example, a binding agent that specifically binds to the polypeptide or an antibody or other agent that specifically binds to the binding agent, such as an anti-immunoglobulin, protein G, protein A or a lectin. Alternatively, a competitive assay may be utilized, in which a polypeptide is labeled with a reporter group and allowed to bind to the immobilized binding agent after incubation of the binding agent with the sample. The extent to which components of the sample inhibit the binding of the labeled polypeptide to the binding agent is indicative of the reactivity of the sample with the immobilized binding agent. Suitable polypeptides for use within such assays include polypeptides of the invention and portions thereof, or antibodies, to which the binding agent binds, as described above.

[0401] The solid support may be any material known to those of skill in the art to which polypeptides of the invention may be attached. For example, the solid support may be a test well in a microtiter plate or a nitrocellulose or other suitable membrane. Alternatively, the support may be a bead or disc, such as glass fiberglass, latex or a plastic material such as polystyrene or polyvinylchloride. The support may also be a magnetic particle or a fiber optic sensor, such as those disclosed, for example, in U.S. Pat. No. 5,359,681. The binding agent may be immobilized on the solid support using a variety of techniques known to those of skill in the art, which are amply described in the patent and scientific literature. In the context of the present invention, the term “immobilization” refers to both noncovalent association, such as adsorption, and covalent attachment (which may be a direct linkage between the agent and functional groups on the support or may be a linkage by way of a cross-linking agent). Immobilization by adsorption to a well in a microtiter plate or to a membrane is preferred. In such cases, adsorption may be achieved by contacting the binding agent, in a suitable buffer, with the solid support for the suitable amount of time. The contact time varies with temperature, but is typically between about 1 hour and about 1 day. In general, contacting a well of plastic microtiter plate (such as polystyrene or polyvinylchloride) with an amount of binding agent ranging from about 10 ng to about 10 ug, and preferably about 100 ng to about 1 ug, is sufficient to immobilize an adequate amount of binding agent.

[0402] Covalent attachment of binding agent to a solid support may generally be achieved by first reacting the support with a bifunctional reagent that will react with both the support and a functional group, such as a hydroxyl or amino group, on the binding agent. For example, the binding agent may be covalently attached to supports having an appropriate polymer coating using benzoquinone or by condensation of an aldehyde group on the support with an amine and an active hydrogen on the binding partner (see, e.g., Pierce Immunotechnology Catalog and Handbook, 1991, at A12-A13).

### Gene Therapy Methods

[0403] Also encompassed by the invention are gene therapy methods for treating or preventing disorders, diseases and conditions. The gene therapy methods relate to the introduction of nucleic acid (DNA, RNA and antisense DNA or RNA) sequences into an animal to achieve expression of the polypeptide of the present invention. This method requires a polynucleotide which codes for a polypeptide of the present invention operatively linked to a promoter and any other genetic elements necessary for the expression of the polypeptide by the target tissue. Such gene therapy and delivery techniques are known in the art, see, for example, WO90/11092, which is herein incorporated by reference.

[0404] Thus, for example, cells from a patient may be engineered with a polynucleotide (DNA or RNA) comprising a promoter operably linked to a polynucleotide of the present invention ex vivo, with the engineered cells then being provided to a patient to be treated with the polypeptide of the present invention. Such methods are well-known in the art. For example, see Belldegrun, A., et al., J. Natl. Cancer Inst. 85: 207-216 (1993); Ferrantini, M. et al., Cancer Research 53: 1107-1112 (1993); Ferrantini, M. et al., J. Immunology 153: 4604-4615 (1994); Kaido, T., et al., Int. J. Cancer 60: 221-229 (1995); Ogura, H., et al., Cancer Research 50: 5102-5106 (1990); Santodonato, L., et al., Human Gene Therapy 7:1-10 (1996); Santodonato, L., et al., Gene Therapy 4:1246-1255 (1997); and Zhang, J. F. et al., Cancer Gene Therapy 3: 31-38 (1996)), which are herein incorporated by reference. In one embodiment, the cells which are engineered are arterial cells. The arterial cells may be reintroduced into the patient through direct injection to the artery, the tissues surrounding the artery, or through catheter injection.

[0405] As discussed in more detail below, the polynucleotide constructs can be delivered by any method that delivers injectable materials to the cells of an animal, such as, injection into the interstitial space of tissues (heart, muscle, skin, lung, liver, and the like). The polynucleotide constructs may be delivered in a pharmaceutically acceptable liquid or aqueous carrier.

[0406] In one embodiment, the polynucleotide of the present invention is delivered as a naked polynucleotide. The term “naked” polynucleotide, DNA or RNA refers to sequences that are free from any delivery vehicle that acts to assist, promote or facilitate entry into the cell, including viral sequences, viral particles, liposome formulations, lipofectin or precipitating agents and the like. However, the polynucleotide of the present invention can also be delivered in liposome formulations and lipofectin formulations and the like can be prepared by methods well known to those skilled in the art. Such methods are described, for example, in U.S. Pat. Nos. 5,593,972, 5,589,466, and 5,580,859, which are herein incorporated by reference.

[0407] The polynucleotide vector constructs used in the gene therapy method are preferably constructs that will not integrate into the host genome nor will they contain sequences that allow for replication. Appropriate vectors include pWLNEO, pSV2CAT, pOG44, pXT1 and pSG available from Stratagene; pSVK3, pBPV, pMSG and pSVL available from Pharmacia; and pEF1/V5, pcDNA3.1, and pRc/CMV2 available from Invitrogen. Other suitable vectors will be readily apparent to the skilled artisan.

[0408] Any strong promoter known to those skilled in the art can be used for driving the expression of the polynucleotide sequence. Suitable promoters include adenoviral promoters, such as the adenoviral major late promoter; or heterologous promoters, such as the cytomegalovirus (CMV) promoter; the respiratory syncytial virus (RSV) promoter; inducible promoters, such as the MMT promoter, the metallothionein promoter; heat shock promoters; the albumin promoter; the ApoAI promoter; human globin promoters; viral thymidine kinase promoters, such as the Herpes Simplex thymidine kinase promoter; retroviral LTRs; the b-actin promoter; and human growth hormone promoters. The promoter also may be the native promoter for the polynucleotide of the present invention.

[0409] Unlike other gene therapy techniques, one major advantage of introducing naked nucleic acid sequences into target cells is the transitory nature of the polynucleotide synthesis in the cells. Studies have shown that non-replicating DNA sequences can be introduced into cells to provide production of the desired polypeptide for periods of up to six months.

[0410] The polynucleotide construct can be delivered to the interstitial space of tissues within the an animal, including of muscle, skin, brain, lung, liver, spleen, bone marrow, thymus, heart, lymph, blood, bone, cartilage, pancreas, kidney, gall bladder, stomach, intestine, testis, ovary, uterus, rectum, nervous system, eye, gland, and connective tissue. Interstitial space of the tissues comprises the intercellular, fluid, mucopolysaccharide matrix among the reticular fibers of organ tissues, elastic fibers in the walls of vessels or chambers, collagen fibers of fibrous tissues, or that same matrix within connective tissue ensheathing muscle cells or in the lacunae of bone. It is similarly the space occupied by the plasma of the circulation and the lymph fluid of the lymphatic channels. Delivery to the interstitial space of muscle tissue is preferred for the reasons discussed below. They may be conveniently delivered by injection into the tissues comprising these cells. They are preferably delivered to and expressed in persistent, non-dividing cells which are differentiated, although delivery and expression may be achieved in non-differentiated or less completely differentiated cells, such as, for example, stem cells of blood or skin fibroblasts. In vivo muscle cells are particularly competent in their ability to take up and express polynucleotides.

[0411] For the naked nucleic acid sequence injection, an effective dosage amount of DNA or RNA will be in the range of from about 0.05 mg/kg body weight to about 50 mg/kg body weight. Preferably the dosage will be from about 0.005 mg/kg to about 20 mg/kg and more preferably from about 0.05 mg/kg to about 5 mg/kg. Of course, as the artisan of ordinary skill will appreciate, this dosage will vary according to the tissue site of injection. The appropriate and effective dosage of nucleic acid sequence can readily be determined by those of ordinary skill in the art and may depend on the condition being treated and the route of administration.

[0412] The preferred route of administration is by the parenteral route of injection into the interstitial space of tissues. However, other parenteral routes may also be used, such as, inhalation of an aerosol formulation particularly for delivery to lungs or bronchial tissues, throat or mucous membranes of the nose. In addition, naked DNA constructs can be delivered to arteries during angioplasty by the catheter used in the procedure.

[0413] The naked polynucleotides are delivered by any method known in the art, including, but not limited to, direct needle injection at the delivery site, intravenous injection, topical administration, catheter infusion, and so-called “gene guns”. These delivery methods are known in the art.

[0414] The constructs may also be delivered with delivery vehicles such as viral sequences, viral particles, liposome formulations, lipofectin, precipitating agents, etc. Such methods of delivery are known in the art.

[0415] In certain embodiments, the polynucleotide constructs are complexed in a liposome preparation. Liposomal preparations for use in the instant invention include cationic (positively charged), anionic (negatively charged) and neutral preparations. However, cationic liposomes are particularly preferred because a tight charge complex can be formed between the cationic liposome and the polyanionic nucleic acid. Cationic liposomes have been shown to mediate intracellular delivery of plasmid DNA (Felgner et al., Proc. Natl. Acad. Sci. USA (1987) 84:7413-7416, which is herein incorporated by reference); mRNA (Malone et al., Proc. Natl. Acad. Sci. USA (1989) 86:6077-6081, which is herein incorporated by reference); and purified transcription factors (Debs et al., J. Biol. Chem. (1990) 265:10189-10192, which is herein incorporated by reference), in functional form.

[0416] Cationic liposomes are readily available. For example, N[1-2,3-dioleyloxy)propyl]-N,N,N-triethylammonium (DOTMA) liposomes are particularly useful and are available under the trademark Lipofectin, from GIBCO BRL, Grand Island, N.Y. (See, also, Felgner et al., Proc. Natl Acad. Sci. USA (1987) 84:7413-7416, which is herein incorporated by reference). Other commercially available liposomes include transfectace (DDAB/DOPE) and DOTAP/DOPE (Boehringer).

[0417] Other cationic liposomes can be prepared from readily available materials using techniques well known in the art. See, e.g. PCT Publication No. WO 90/11092 (which is herein incorporated by reference) for a description of the synthesis of DOTAP (1,2-bis(oleoyloxy)-3-(trimethylammanio)propane) liposomes. Preparation of DOTMA liposomes is explained in the literature, see, e.g., P. Felgner et al., Proc. Natl. Acad. Sci. USA 84:7413-7417, which is herein incorporated by reference. Similar methods can be used to prepare liposomes from other cationic lipid materials.

[0418] Similarly, anionic and neutral liposomes are readily available, such as from Avanti Polar Lipids (Birmingham, Ala.), or can be easily prepared using readily available materials. Such materials include phosphatidyl, choline, cholesterol, phosphatidyl ethanolamine, dioleoylphosphatidyl choline (DOPC), dioleoylphosphatidyl glycerol (DOPG), dioleoylphoshatidyl ethanolamine (DOPE), among others. These materials can also be mixed with the DOTMA and DOTAP starting materials in appropriate ratios. Methods for making liposomes using these materials are well known in the art.

[0419] For example, commercially dioleoylphosphatidyl choline (DOPC), dioleoylphosphatidyl glycerol (DOPG), and dioleoylphosphatidyl ethanolamine (DOPE) can be used in various combinations to make conventional liposomes, with or without the addition of cholesterol. Thus, for example, DOPG/DOPC vesicles can be prepared by drying 50 mg each of DOPG and DOPC under a stream of nitrogen gas into a sonication vial. The sample is placed under a vacuum pump overnight and is hydrated the following day with deionized water. The sample is then sonicated for 2 hours in a capped vial, using a Heat Systems model 350 sonicator equipped with an inverted cup (bath type) probe at the maximum setting while the bath is circulated at 15EC. Alternatively, negatively charged vesicles can be prepared without sonication to produce multilamellar vesicles or by extrusion through nucleopore membranes to produce unilamellar vesicles of discrete size. Other methods are known and available to those of skill in the art.

[0420] The liposomes can comprise multilamellar vesicles (MLVs), small unilamellar vesicles (SUVs), or large unilamellar vesicles (LUVs), with SUVs being preferred. The various liposome-nucleic acid complexes are prepared using methods well known in the art. See, e.g., Straubinger et al., Methods of Immunology (1983), 101:512-527, which is herein incorporated by reference. For example, MLVs containing nucleic acid can be prepared by depositing a thin film of phospholipid on the walls of a glass tube and subsequently hydrating with a solution of the material to be encapsulated. SUVs are prepared by extended sonication of MLVs to produce a homogeneous population of unilamellar liposomes. The material to be entrapped is added to a suspension of preformed MLVs and then sonicated. When using liposomes containing cationic lipids, the dried lipid film is resuspended in an appropriate solution such as sterile water or an isotonic buffer solution such as 10 mM Tris/NaCl, sonicated, and then the preformed liposomes are mixed directly with the DNA. The liposome and DNA form a very stable complex due to binding of the positively charged liposomes to the cationic DNA. SUVs find use with small nucleic acid fragments. LUVs are prepared by a number of methods, well known in the art. Commonly used methods include Ca²⁺-EDTA chelation (Papahadjopoulos et al., Biochim. Biophys. Acta (1975) 394:483; Wilson et al., Cell 17:77 (1979)); ether injection (Deamer, D. and Bangham, A., Biochim. Biophys. Acta 443:629 (1976); Ostro et al., Biochem. Biophys. Res. Commun. 76:836 (1977); Fraley et al., Proc. Natl. Acad. Sci. USA 76:3348 (1979)); detergent dialysis (Enoch, H. and Strittmatter, P., Proc. Natl. Acad. Sci. USA 76:145 (1979)); and reverse-phase evaporation (REV) (Fraley et al., J. Biol. Chem. 255:10431 (1980); Szoka, F. and Papahadjopoulos, D., Proc. Natl. Acad. Sci. USA 75:145 (1978); Schaefer-Ridder et al., Science 215:166 (1982)), which are herein incorporated by reference.

[0421] Generally, the ratio of DNA to liposomes will be from about 10:1 to about 1:10. Preferably, the ration will be from about 5:1 to about 1:5. More preferably, the ration will be about 3:1 to about 1:3. Still more preferably, the ratio will be about 1:1.

[0422] U.S. Pat. No. 5,676,954 (which is herein incorporated by reference) reports on the injection of genetic material, complexed with cationic liposomes carriers, into mice. U.S. Pat. Nos. 4,897,355, 4,946,787, 5,049,386, 5,459,127, 5,589,466, 5,693,622, 5,580,859, 5,703,055, and international publication no. WO 94/9469 (which are herein incorporated by reference) provide cationic lipids for use in transfecting DNA into cells and mammals. U.S. Pat. Nos. 5,589,466, 5,693,622, 5,580,859, 5,703,055, and international publication no. WO 94/9469 provide methods for delivering DNA-cationic lipid complexes to mammals.

[0423] In certain embodiments, cells are engineered, ex vivo or in vivo, using a retroviral particle containing RNA which comprises a sequence encoding a polypeptide of the present invention. Retroviruses from which the retroviral plasmid vectors may be derived include, but are not limited to, Moloney Murine Leukemia Virus, spleen necrosis virus, Rous sarcoma Virus, Harvey Sarcoma Virus, avian leukosis virus, gibbon ape leukemia virus, human immunodeficiency virus, Myeloproliferative Sarcoma Virus, and mammary tumor virus.

[0424] The retroviral plasmid vector is employed to transduce packaging cell lines to form producer cell lines. Examples of packaging cells which may be transfected include, but are not limited to, the PE501, PA317, R-2, R-AM, PA12, T19-14X, VT-19-17-H2, RCRE, RCRIP, GP+E-86, GP+envAm12, and DAN cell lines as described in Miller, Human Gene Therapy 1:5-14 (1990), which is incorporated herein by reference in its entirety. The vector may transduce the packaging cells through any means known in the art. Such means include, but are not limited to, electroporation, the use of liposomes, and CaPO₄ precipitation. In one alternative, the retroviral plasmid vector may be encapsulated into a liposome, or coupled to a lipid, and then administered to a host.

[0425] The producer cell line generates infectious retroviral vector particles which include polynucleotide encoding a polypeptide of the present invention. Such retroviral vector particles then may be employed, to transduce eukaryotic cells, either in vitro or in vivo. The transduced eukaryotic cells will express a polypeptide of the present invention.

[0426] In certain other embodiments, cells are engineered, ex vivo or in vivo, with polynucleotide contained in an adenovirus vector. Adenovirus can be manipulated such that it encodes and expresses a polypeptide of the present invention, and at the same time is inactivated in terms of its ability to replicate in a normal lytic viral life cycle. Adenovirus expression is achieved without integration of the viral DNA into the host cell chromosome, thereby alleviating concerns about insertional mutagenesis. Furthermore, adenoviruses have been used as live enteric vaccines for many years with an excellent safety profile (Schwartz et al. Am. Rev. Respir. Dis.109:233-238 (1974)). Finally, adenovirus mediated gene transfer has been demonstrated in a number of instances including transfer of alpha-1-antitrypsin and CFTR to the lungs of cotton rats (Rosenfeld, M. A. et al. (1991) Science 252:431-434; Rosenfeld et al., (1992) Cell 68:143-155). Furthermore, extensive studies to attempt to establish adenovirus as a causative agent in human cancer were uniformly negative (Green, M. et al. (1979) Proc. Natl. Acad. Sci. USA 76:6606).

[0427] Suitable adenoviral vectors useful in the present invention are described, for example, in Kozarsky and Wilson, Curr. Opin. Genet. Devel. 3:499-503 (1993); Rosenfeld et al., Cell 68:143-155 (1992); Engelhardt et al., Human Genet. Ther. 4:759-769 (1993); Yang et al., Nature Genet. 7:362-369 (1994); Wilson et al., Nature 365:691-692 (1993); and U.S. Pat. No. 5,652,224, which are herein incorporated by reference. For example, the adenovirus vector Ad2 is useful and can be grown in human 293 cells. These cells contain the E1 region of adenovirus and constitutively express Ela and Elb, which complement the defective adenoviruses by providing the products of the genes deleted from the vector. In addition to Ad2, other varieties of adenovirus (e.g., Ad3, Ad5, and Ad7) are also useful in the present invention.

[0428] Preferably, the adenoviruses used in the present invention are replication deficient. Replication deficient adenoviruses require the aid of a helper virus and/or packaging cell line to form infectious particles. The resulting virus is capable of infecting cells and can express a polynucleotide of interest which is operably linked to a promoter, but cannot replicate in most cells. Replication deficient adenoviruses may be deleted in one or more of all or a portion of the following genes: E1a, E1b, E3, E4, E2a, or L1 through L5.

[0429] In certain other embodiments, the cells are engineered, ex vivo or in vivo, using an adeno-associated virus (AAV). AAVs are naturally occurring defective viruses that require helper viruses to produce infectious particles (Muzyczka, N., Curr. Topics in Microbiol. Immunol. 158:97 (1992)). It is also one of the few viruses that may integrate its DNA into non-dividing cells. Vectors containing as little as 300 base pairs of AAV can be packaged and can integrate, but space for exogenous DNA is limited to about 4.5 kb. Methods for producing and using such AAVs are known in the art. See, for example, U.S. Pat. Nos. 5,139,941, 5,173,414, 5,354,678, 5,436,146, 5,474,935, 5,478,745, and 5,589,377.

[0430] For example, an appropriate AAV vector for use in the present invention will include all the sequences necessary for DNA replication, encapsidation, and host-cell integration. The polynucleotide construct is inserted into the AAV vector using standard cloning methods, such as those found in Sambrook et al., Molecular Cloning: A Laboratory Manual, Cold Spring Harbor Press (1989). The recombinant AAV vector is then transfected into packaging cells which are infected with a helper virus, using any standard technique, including lipofection, electroporation, calcium phosphate precipitation, etc. Appropriate helper viruses include adenoviruses, cytomegaloviruses, vaccinia viruses, or herpes viruses. Once the packaging cells are transfected and infected, they will produce infectious AAV viral particles which contain the polynucleotide construct. These viral particles are then used to transduce eukaryotic cells, either ex vivo or in vivo. The transduced cells will contain the polynucleotide construct integrated into its genome, and will express a polypeptide of the invention.

[0431] Another method of gene therapy involves operably associating heterologous control regions and endogenous polynucleotide sequences (e.g. encoding a polypeptide of the present invention) via homologous recombination (see, e.g., U.S. Pat. No. 5,641,670, issued Jun. 24, 1997; International Publication No. WO 96/29411, published Sep. 26, 1996; International Publication No. WO 94/12650, published Aug. 4, 1994; Koller et al., Proc. Natl. Acad. Sci. USA 86:8932-8935 (1989); and Zijlstra et al., Nature 342:435-438 (1989), which are herein encorporated by reference. This method involves the activation of a gene which is present in the target cells, but which is not normally expressed in the cells, or is expressed at a lower level than desired.

[0432] Polynucleotide constructs are made, using standard techniques known in the art, which contain the promoter with targeting sequences flanking the promoter. Suitable promoters are described herein. The targeting sequence is sufficiently complementary to an endogenous sequence to permit homologous recombination of the promoter-targeting sequence with the endogenous sequence. The targeting sequence will be sufficiently near the 5′ end of the desired endogenous polynucleotide sequence so the promoter will be operably linked to the endogenous sequence upon homologous recombination.

[0433] The promoter and the targeting sequences can be amplified using PCR. Preferably, the amplified promoter contains distinct restriction enzyme sites on the 5′ and 3′ ends. Preferably, the 3′ end of the first targeting sequence contains the same restriction enzyme site as the 5′ end of the amplified promoter and the 5′ end of the second targeting sequence contains the same restriction site as the 3′ end of the amplified promoter. The amplified promoter and targeting sequences are digested and ligated together.

[0434] The promoter-targeting sequence construct is delivered to the cells, either as naked polynucleotide, or in conjunction with transfection-facilitating agents, such as liposomes, viral sequences, viral particles, whole viruses, lipofection, precipitating agents, etc., described in more detail above. The P promoter-targeting sequence can be delivered by any method, included direct needle injection, intravenous injection, topical administration, catheter infusion, particle accelerators, etc. The methods are described in more detail below.

[0435] The promoter-targeting sequence construct is taken up by cells. Homologous recombination between the construct and the endogenous sequence takes place, such that an endogenous sequence is placed under the control of the promoter. The promoter then drives the expression of the endogenous sequence.

[0436] The polynucleotide encoding a polypeptide of the present invention may contain a secretory signal sequence that facilitates secretion of the protein. Typically, the signal sequence is positioned in the coding region of the polynucleotide to be expressed towards or at the 5′ end of the coding region. The signal sequence may be homologous or heterologous to the polynucleotide of interest and may be homologous or heterologous to the cells to be transfected. Additionally, the signal sequence may be chemically synthesized using methods known in the art.

[0437] Any mode of administration of any of the above-described polynucleotides constructs can be used so long as the mode results in the expression of one or more molecules in an amount sufficient to provide a therapeutic effect. This includes direct needle injection, systemic injection, catheter infusion, biolistic injectors, particle accelerators (i.e., “gene guns”), gelfoam sponge depots, other commercially available depot materials, osmotic pumps (e.g., Alza minipumps), oral or suppositorial solid (tablet or pill) pharmaceutical formulations, and decanting or topical applications during surgery. For example, direct injection of naked calcium phosphate-precipitated plasmid into rat liver and rat spleen or a protein-coated plasmid into the portal vein has resulted in gene expression of the foreign gene in the rat livers (Kaneda et al., Science 243:375 (1989)).

[0438] A preferred method of local administration is by direct injection. Preferably, a recombinant molecule of the present invention complexed with a delivery vehicle is administered by direct injection into or locally within the area of arteries. Administration of a composition locally within the area of arteries refers to injecting the composition centimeters and preferably, millimeters within arteries.

[0439] Another method of local administration is to contact a polynucleotide construct of the present invention in or around a surgical wound. For example, a patient can undergo surgery and the polynucleotide construct can be coated on the surface of tissue inside the wound or the construct can be injected into areas of tissue inside the wound.

[0440] Therapeutic compositions useful in systemic administration, include recombinant molecules of the present invention complexed to a targeted delivery vehicle of the present invention. Suitable delivery vehicles for use with systemic administration comprise liposomes comprising ligands for targeting the vehicle to a particular site. In specific embodiments, suitable delivery vehicles for use with systemic administration comprise liposomes comprising polypeptides of the invention for targeting the vehicle to a particular site.

[0441] Preferred methods of systemic administration, include intravenous injection, aerosol, oral and percutaneous (topical) delivery. Intravenous injections can be performed using methods standard in the art. Aerosol delivery can also be performed using methods standard in the art (see, for example, Stribling et al., Proc. Natl. Acad. Sci. USA 189:11277-11281, 1992, which is incorporated herein by reference). Oral delivery can be performed by complexing a polynucleotide construct of the present invention to a carrier capable of withstanding degradation by digestive enzymes in the gut of an animal. Examples of such carriers, include plastic capsules or tablets, such as those known in the art. Topical delivery can be performed by mixing a polynucleotide construct of the present invention with a lipophilic reagent (e.g., DMSO) that is capable of passing into the skin.

[0442] Determining an effective amount of substance to be delivered can depend upon a number of factors including, for example, the chemical structure and biological activity of the substance, the age and weight of the animal, the precise condition requiring treatment and its severity, and the route of administration. The frequency of treatments depends upon a number of factors, such as the amount of polynucleotide constructs administered per dose, as well as the health and history of the subject. The precise amount, number of doses, and timing of doses will be determined by the attending physician or veterinarian.

[0443] Therapeutic compositions of the present invention can be administered to any animal, preferably to mammals and birds. Preferred mammals include humans, dogs, cats, mice, rats, rabbits sheep, cattle, horses and pigs, with humans being particularly preferred.

### Biological Activities

[0444] Polynucleotides or polypeptides, or agonists or antagonists of the present invention, can be used in assays to test for one or more biological activities. If these polynucleotides or polypeptides, or agonists or antagonists of the present invention, do exhibit activity in a particular assay, it is likely that these molecules may be involved in the diseases associated with the biological activity. Thus, the polynucleotides and polypeptides, and agonists or antagonists could be used to treat the associated disease.

[0445] Neoplastic disease associated proteins are believed to be involved in biological activities associated with neoplastic disorders, as well as pre-neoplastic conditions. Accordingly, compositions of the invention (including polynucleotides, polypeptides and antibodies of the invention, and fragments and variants thereof) may be used in the diagnosis, prognosis, prevention, and/or treatment of neoplastic as well as pre-neoplastic diseases and/or disorders.

[0446] In preferred embodiments, compositions of the invention (including polynucleotides, polypeptides and antibodies of the invention, and fragments and variants thereof) are used in the diagnosis, prognosis, prevention, and/or treatment of neoplastic disorders (e.g., leukemias, cancers, and/or as described in the sections entitled “Immune Activity” and “Hyperproliferative Disorders”).

[0447] In another preferred embodiment, compositions of the invention (including polynucleotides, polypeptides and antibodies of the invention, and fragments and variants thereof) are used in the diagnosis, prognosis, prevention, and/or treatment of pre-neoplastic conditions, including, but not limited to, hyperplasia (e.g., endometrial hyperplasia and/or as described in the section entitled “Hyperproliferative Disorders”), metaplasia (e.g., connective tissue metaplasia, atypical metaplasia, and/or as described in the section entitled “Hyperproliferative Disorders”), and/or dysplasia (e.g., cervical dysplasia, bronchopulmonary dysplasia, and/or as described in the section entitled “Hyperproliferative Disorders”).

[0448] In another embodiment, compositions of the invention (including polynucleotides, polypeptides and antibodies of the invention, and fragments and variants thereof) are used in the diagnosis, prognosis, prevention, and/or treatment of benign dysproliferative disorders, including, but not limited to, benign tumors, fibrocystic conditions, tissue hypertrophy, and/or as described in the section entitled “Hyperproliferative Disorders”.

[0449] In another embodiment, a polypeptide of the invention, or polynucleotides, antibodies, agonists, or antagonists corresponding to that polypeptide, may be used to diagnose, prognose, prevent, and/or treat diseases and/or disorders associated with the tissue(s) in which the polypeptide of the invention is expressed, including one, two, three, four, five, or more tissues disclosed in Table 1a, column 8 (Tissue Distribution Library Code).

[0450] Thus, polynucleotides, translation products and antibodies of the invention are useful in the diagnosis, prognosis, prevention, and/or treatment of diseases and/or disorders associated with activities that include, but are not limited to, the initiation, proliferation, maintainance, and/or metastasis of neoplasms.

[0451] More generally, polynucleotides, translation products and antibodies corresponding to this gene may be useful for the diagnosis, prognosis, prevention and/or treatment of diseases and/or disorders associated with the following systems.

### Hyperproliferative Disorders

[0452] In certain embodiments, polynucleotides or polypeptides, or agonists or antagonists of the present invention can be used to treat or detect hyperproliferative disorders, including neoplasms. Polynucleotides or polypeptides, or agonists or antagonists of the present invention may inhibit the proliferation of the disorder through direct or indirect interactions. Alternatively, Polynucleotides or polypeptides, or agonists or antagonists of the present invention may proliferate other cells which can inhibit the hyperproliferative disorder.

[0453] For example, by increasing an immune response, particularly increasing antigenic qualities of the hyperproliferative disorder or by proliferating, differentiating, or mobilizing T-cells, hyperproliferative disorders can be treated. This immune response may be increased by either enhancing an existing immune response, or by initiating a new immune response. Alternatively, decreasing an immune response may also be a method of treating hyperproliferative disorders, such as a chemotherapeutic agent.

[0454] Examples of hyperproliferative disorders that can be treated or detected by polynucleotides or polypeptides, or agonists or antagonists of the present invention include, but are not limited to neoplasms located in the: colon, abdomen, bone, breast, digestive system, liver, pancreas, peritoneum, endocrine glands (adrenal, parathyroid, pituitary, testicles, ovary, thymus, thyroid), eye, head and neck, nervous (central and peripheral), a lymphatic system, pelvis, skin, soft tissue, spleen, thorax, and urogenital tract.

[0455] Similarly, other hyperproliferative disorders can also be treated or detected by polynucleotides or polypeptides, or agonists or antagonists of the present invention. Examples of such hyperproliferative disorders include, but are not limited to: Acute Childhood Lymphoblastic Leukemia, Acute Lymphoblastic Leukemia, Acute Lymphocytic Leukemia, Acute Myeloid Leukemia, Adrenocortical Carcinoma, Adult (Primary) Hepatocellular Cancer, Adult (Primary) Liver Cancer, Adult Acute Lymphocytic Leukemia, Adult Acute Myeloid Leukemia, Adult Hodgkin's Disease, Adult Hodgkin's Lymphoma, Adult Lymphocytic Leukemia, Adult Non-Hodgkin's Lymphoma, Adult Primary Liver Cancer, Adult Soft Tissue Sarcoma, AIDS-Related Lymphoma, AIDS-Related Malignancies, Anal Cancer, Astrocytoma, Bile Duct Cancer, Bladder Cancer, Bone Cancer, Brain Stem Glioma, Brain Tumors, Breast Cancer, Cancer of the Renal Pelvis and Ureter, Central Nervous System (Primary) Lymphoma, Central Nervous System Lymphoma, Cerebellar Astrocytoma, Cerebral Astrocytoma, Cervical Cancer, Childhood (Primary) Hepatocellular Cancer, Childhood (Primary) Liver Cancer, Childhood Acute Lymphoblastic Leukemia, Childhood Acute Myeloid Leukemia, Childhood Brain Stem Glioma, Childhood Cerebellar Astrocytoma, Childhood Cerebral Astrocytoma, Childhood Extracranial Germ Cell Tumors, Childhood Hodgkin's Disease, Childhood Hodgkin's Lymphoma, Childhood Hypothalamic and Visual Pathway Glioma, Childhood Lymphoblastic Leukemia, Childhood Medulloblastoma, Childhood Non-Hodgkin's Lymphoma, Childhood Pineal and Supratentorial Primitive Neuroectodermal Tumors, Childhood Primary Liver Cancer, Childhood Rhabdomyosarcoma, Childhood Soft Tissue Sarcoma, Childhood Visual Pathway and Hypothalamic Glioma, Chronic Lymphocytic Leukemia, Chronic Myelogenous Leukemia, Colon Cancer, Cutaneous T-Cell Lymphoma, Endocrine Pancreas Islet Cell Carcinoma, Endometrial Cancer, Ependymoma, Epithelial Cancer, Esophageal Cancer, Ewing's Sarcoma and Related Tumors, Exocrine Pancreatic Cancer, Extracranial Germ Cell Tumor, Extragonadal Germ Cell Tumor, Extrahepatic Bile Duct Cancer, Eye Cancer, Female Breast Cancer, Gaucher's Disease, Gallbladder Cancer, Gastric Cancer, Gastrointestinal Carcinoid Tumor, Gastrointestinal Tumors, Germ Cell Tumors, Gestational Trophoblastic Tumor, Hairy Cell Leukemia, Head and Neck Cancer, Hepatocellular Cancer, Hodgkin's Disease, Hodgkin's Lymphoma, Hypergammaglobulinemia, Hypopharyngeal Cancer, Intestinal Cancers, Intraocular Melanoma, Islet Cell Carcinoma, Islet Cell Pancreatic Cancer, Kaposi's Sarcoma, Kidney Cancer, Laryngeal Cancer, Lip and Oral Cavity Cancer, Liver Cancer, Lung Cancer, Lymphoproliferative Disorders, Macroglobulinemia, Male Breast Cancer, Malignant Mesothelioma, Malignant Thymoma, Medulloblastoma, Melanoma, Mesothelioma, Metastatic Occult Primary Squamous Neck Cancer, Metastatic Primary Squamous Neck Cancer, Metastatic Squamous Neck Cancer, Multiple Myeloma, Multiple Myeloma/Plasma Cell Neoplasm, Myelodysplastic Syndrome, Myelogenous Leukemia, Myeloid Leukemia, Myeloproliferative Disorders, Nasal Cavity and Paranasal Sinus Cancer, Nasopharyngeal Cancer, Neuroblastoma, Non-Hodgkin's Lymphoma During Pregnancy, Nonmelanoma Skin Cancer, Non-Small Cell Lung Cancer, Occult Primary Metastatic Squamous Neck Cancer, Oropharyngeal Cancer, Osteo-/Malignant Fibrous Sarcoma, Osteosarcoma/Malignant Fibrous Histiocytoma, Osteosarcoma/Malignant Fibrous Histiocytoma of Bone, Ovarian Epithelial Cancer, Ovarian Germ Cell Tumor, Ovarian Low Malignant Potential Tumor, Pancreatic Cancer, Paraproteinemias, Purpura, Parathyroid Cancer, Penile Cancer, Pheochromocytoma, Pituitary Tumor, Plasma Cell Neoplasm/Multiple Myeloma, Primary Central Nervous System Lymphoma, Primary Liver Cancer, Prostate Cancer, Rectal Cancer, Renal Cell Cancer, Renal Pelvis and Ureter Cancer, Retinoblastoma, Rhabdomyosarcoma, Salivary Gland Cancer, Sarcoidosis Sarcomas, Sezary Syndrome, Skin Cancer, Small Cell Lung Cancer, Small Intestine Cancer, Soft Tissue Sarcoma, Squamous Neck Cancer, Stomach Cancer, Supratentorial Primitive Neuroectodermal and Pineal Tumors, T-Cell Lymphoma, Testicular Cancer, Thymoma, Thyroid Cancer, Transitional Cell Cancer of the Renal Pelvis and Ureter, Transitional Renal Pelvis and Ureter Cancer, Trophoblastic Tumors, Ureter and Renal Pelvis Cell Cancer, Urethral Cancer, Uterine Cancer, Uterine Sarcoma, Vaginal Cancer, Visual Pathway and Hypothalamic Glioma, Vulvar Cancer, Waldenstrom's Macroglobulinemia, Wilms'Tumor, and any other hyperproliferative disease, besides neoplasia, located in an organ system listed above.

[0456] In another preferred embodiment, polynucleotides or polypeptides, or agonists or antagonists of the present invention are used to diagnose, prognose, prevent, and/or treat premalignant conditions and to prevent progression to a neoplastic or malignant state, including but not limited to those disorders described above. Such uses are indicated in conditions known or suspected of preceding progression to neoplasia or cancer, in particular, where non-neoplastic cell growth consisting of hyperplasia, metaplasia, or most particularly, dysplasia has occurred (for review of such abnormal growth conditions, see Robbins and Angell, 1976, Basic Pathology, 2d Ed. W. B. Saunders Co., Philadelphia, pp. 68-79.)

[0457] Hyperplasia is a form of controlled cell proliferation, involving an increase in cell number in a tissue or organ, without significant alteration in structure or function. Hyperplastic disorders which can be diagnosed, prognosed, prevented, and/or treated with compositions of the invention (including polynucleotides, polypeptides, agonists or antagonists) include, but are not limited to, angiofollicular mediastinal lymph node hyperplasia, angiolymphoid hyperplasia with eosinophilia, atypical melanocytic hyperplasia, basal cell hyperplasia, benign giant lymph node hyperplasia, cementum hyperplasia, congenital adrenal hyperplasia, congenital sebaceous hyperplasia, cystic hyperplasia, cystic hyperplasia of the breast, denture hyperplasia, ductal hyperplasia, endometrial hyperplasia, fibromuscular hyperplasia, focal epithelial hyperplasia, gingival hyperplasia, inflammatory fibrous hyperplasia, inflammatory papillary hyperplasia, intravascular papillary endothelial hyperplasia, nodular hyperplasia of prostate, nodular regenerative hyperplasia, pseudoepitheliomatous hyperplasia, senile sebaceous hyperplasia, and verrucous hyperplasia.

[0458] Metaplasia is a form of controlled cell growth in which one type of adult or fully differentiated cell substitutes for another type of adult cell. Metaplastic disorders which can be diagnosed, prognosed, prevented, and/or treated with compositions of the invention (including polynucleotides, polypeptides, agonists or antagonists) include, but are not limited to, agnogenic myeloid metaplasia, apocrine metaplasia, atypical metaplasia, autoparenchymatous metaplasia, connective tissue metaplasia, epithelial metaplasia, intestinal metaplasia, metaplastic anemia, metaplastic ossification, metaplastic polyps, myeloid metaplasia, primary myeloid metaplasia, secondary myeloid metaplasia, squamous metaplasia, squamous metaplasia of amnion, and symptomatic myeloid metaplasia.

[0459] Dysplasia is frequently a forerunner of cancer, and is found mainly in the epithelia; it is the most disorderly form of non-neoplastic cell growth, involving a loss in individual cell uniformity and in the architectural orientation of cells. Dysplastic cells often have abnormally large, deeply stained nuclei, and exhibit pleomorphism. Dysplasia characteristically occurs where there exists chronic irritation or inflammation. Dysplastic disorders which can be diagnosed, prognosed, prevented, and/or treated with compositions of the invention (including polynucleotides, polypeptides, agonists or antagonists) include, but are not limited to, anhidrotic ectodermal dysplasia, anterofacial dysplasia, asphyxiating thoracic dysplasia, atriodigital dysplasia, bronchopulmonary dysplasia, cerebral dysplasia, cervical dysplasia, chondroectodermal dysplasia, cleidocranial dysplasia, congenital ectodermal dysplasia, craniodiaphysial dysplasia, craniocarpotarsal dysplasia, craniometaphysial dysplasia, dentin dysplasia, diaphysial dysplasia, ectodermal dysplasia, enamel dysplasia, encephalo-ophthalmic dysplasia, dysplasia epiphysialis hemimelia, dysplasia epiphysialis multiplex, dysplasia epiphysialis punctata, epithelial dysplasia, faciodigitogenital dysplasia, familial fibrous dysplasia of jaws, familial white folded dysplasia, fibromuscular dysplasia, fibrous dysplasia of bone, florid osseous dysplasia, hereditary renal-retinal dysplasia, hidrotic ectodermal dysplasia, hypohidrotic ectodermal dysplasia, lymphopenic thymic dysplasia, mammary dysplasia, mandibulofacial dysplasia, metaphysial dysplasia, Mondini dysplasia, monostotic fibrous dysplasia, mucoepithelial dysplasia, multiple epiphysial dysplasia, oculoauriculovertebral dysplasia, oculodentodigital dysplasia, oculovertebral dysplasia, odontogenic dysplasia, ophthalmomandibulomelic dysplasia, periapical cemental dysplasia, polyostotic fibrous dysplasia, pseudoachondroplastic spondyloepiphysial dysplasia, retinal dysplasia, septo-optic dysplasia, spondyloepiphysial dysplasia, and ventriculoradial dysplasia.

[0460] Additional pre-neoplastic disorders which can be diagnosed, prognosed, prevented, and/or treated with compositions of the invention (including polynucleotides, polypeptides, agonists or antagonists) include, but are not limited to, benign dysproliferative disorders (e.g., benign tumors, fibrocystic conditions, tissue hypertrophy, intestinal polyps, colon polyps, and esophageal dysplasia), leukoplakia, keratoses, Bowen's disease, Farmer's Skin, solar cheilitis, and solar keratosis.

[0461] In another embodiment, a polypeptide of the invention, or polynucleotides, antibodies, agonists, or antagonists corresponding to that polypeptide, may be used to diagnose and/or prognose disorders associated with the tissue(s) in which the polypeptide of the invention is expressed, including one, two, three, four, five, or more tissues disclosed in Table 1A, column 8 (Tissue Distribution Library Code).

[0462] In another embodiment, polynucleotides, polypeptides, antibodies, and/or agonists or antagonists of the present invention conjugated to a toxin or a radioactive isotope, as described herein, may be used to treat cancers and neoplasms, including, but not limited to those described herein. In a further preferred embodiment, polynucleotides, polypeptides, antibodies, and/or agonists or antagonists of the present invention conjugated to a toxin or a radioactive isotope, as described herein, may be used to treat acute myelogenous leukemia.

[0463] Additionally, polynucleotides, polypeptides, and/or agonists or antagonists of the invention may affect apoptosis, and therefore, would be useful in treating a number of diseases associated with increased cell survival or the inhibition of apoptosis. For example, diseases associated with increased cell survival or the inhibition of apoptosis that could be diagnosed, prognosed, prevented, and/or treated by polynucleotides, polypeptides, and/or agonists or antagonists of the invention, include cancers (such as follicular lymphomas, carcinomas with p53 mutations, and hormone-dependent tumors, including, but not limited to colon cancer, cardiac tumors, pancreatic cancer, melanoma, retinoblastoma, glioblastoma, lung cancer, intestinal cancer, testicular cancer, stomach cancer, neuroblastoma, myxoma, myoma, lymphoma, endothelioma, osteoblastoma, osteoclastoma, osteosarcoma, chondrosarcoma, adenoma, breast cancer, prostate cancer, Kaposi's sarcoma and ovarian cancer); autoimmune disorders such as, multiple sclerosis, Sjogren's syndrome, Hashimoto's thyroiditis, biliary cirrhosis, Behcet's disease, Crohn's disease, polymyositis, systemic lupus erythematosus and immune-related glomerulonephritis and rheumatoid arthritis) and viral infections (such as herpes viruses, pox viruses and adenoviruses), inflammation, graft v. host disease, acute graft rejection, and chronic graft rejection.

[0464] In preferred embodiments, polynucleotides, polypeptides, and/or agonists or antagonists of the invention are used to inhibit growth, progression, and/or metastasis of cancers, in particular those listed above.

[0465] Additional diseases or conditions associated with increased cell survival that could be diagnosed, prognosed, prevented, and/or treated by polynucleotides, polypeptides, and/or agonists or antagonists of the invention, include, but are not limited to, progression, and/or metastases of malignancies and related disorders such as leukemia (including acute leukemias (e.g., acute lymphocytic leukemia, acute myelocytic leukemia (including myeloblastic, promyelocytic, myelomonocytic, monocytic, and erythroleukemia)) and chronic leukemias (e.g., chronic myelocytic (granulocytic) leukemia and chronic lymphocytic leukemia)), polycythemia vera, lymphomas (e.g., Hodgkin's disease and non-Hodgkin's disease), multiple myeloma, Waldenstrom's macroglobulinemia, heavy chain disease, and solid tumors including, but not limited to, sarcomas and carcinomas such as fibrosarcoma, myxosarcoma, liposarcoma, chondrosarcoma, osteogenic sarcoma, chordoma, angiosarcoma, endotheliosarcoma, lymphangiosarcoma, lymphangioendotheliosarcoma, synovioma, mesothelioma, Ewing's tumor, leiomyosarcoma, rhabdomyosarcoma, colon carcinoma, pancreatic cancer, breast cancer, ovarian cancer, prostate cancer, squamous cell carcinoma, basal cell carcinoma, adenocarcinoma, sweat gland carcinoma, sebaceous gland carcinoma, papillary carcinoma, papillary adenocarcinomas, cystadenocarcinoma, medullary carcinoma, bronchogenic carcinoma, renal cell carcinoma, hepatoma, bile duct carcinoma, choriocarcinoma, seminoma, embryonal carcinoma, Wilm's tumor, cervical cancer, testicular tumor, lung carcinoma, small cell lung carcinoma, bladder carcinoma, epithelial carcinoma, glioma, astrocytoma, medulloblastoma, craniopharyngioma, ependymoma, pinealoma, emangioblastoma, acoustic neuroma, oligodendroglioma, menangioma, melanoma, neuroblastoma, and retinoblastoma.

[0466] Diseases associated with increased apoptosis that could be diagnosed, prognosed, prevented, and/or treated by polynucleotides, polypeptides, and/or agonists or antagonists of the invention, include AIDS; neurodegenerative disorders (such as Alzheimer's disease, Parkinson's disease, amyotrophic lateral sclerosis, retinitis pigmentosa, cerebellar degeneration and brain tumor or prior associated disease); autoimmune disorders (such as, multiple sclerosis, Sjogren's syndrome, Hashimoto's thyroiditis, biliary cirrhosis, Behcet's disease, Crohn's disease, polymyositis, systemic lupus erythematosus and immune-related glomerulonephritis and rheumatoid arthritis) myelodysplastic syndromes (such as aplastic anemia), graft v. host disease, ischemic injury (such as that caused by myocardial infarction, stroke and reperfusion injury), liver injury (e.g., hepatitis related liver injury, ischemia/reperfusion injury, cholestosis (bile duct injury) and liver cancer); toxin-induced liver disease (such as that caused by alcohol), septic shock, cachexia and anorexia.

[0467] Hyperproliferative diseases and/or disorders that could be diagnosed, prognosed, prevented, and/or treated by polynucleotides, polypeptides, and/or agonists or antagonists of the invention, include, but are not limited to, neoplasms located in the liver, abdomen, bone, breast, digestive system; pancreas, peritoneum, endocrine glands (adrenal, parathyroid, pituitary, testicles, ovary, thymus, thyroid), eye, head and neck, nervous system (central and peripheral), lymphatic system, pelvis, skin, soft tissue, spleen, thorax, and urogenital tract.

[0468] Similarly, other hyperproliferative disorders can also be diagnosed, prognosed, prevented, and/or treated by polynucleotides, polypeptides, and/or agonists or antagonists of the invention. Examples of such hyperproliferative disorders include, but are not limited to: hypergammaglobulinemia, lymphoproliferative disorders, paraproteinemias, purpura, sarcoidosis, Sezary Syndrome, Waldenstron's macroglobulinemia, Gaucher's Disease, histiocytosis, and any other hyperproliferative disease, besides neoplasia, located in an organ system listed above.

[0469] Another preferred embodiment utilizes polynucleotides of the present invention to inhibit aberrant cellular division, by gene therapy using the present invention, and/or protein fusions or fragments thereof.

[0470] Thus, the present invention provides a method for treating cell proliferative disorders by inserting into an abnormally proliferating cell a polynucleotide of the present invention, wherein said polynucleotide represses said expression.

[0471] Another embodiment of the present invention provides a method of treating cell-proliferative disorders in individuals comprising administration of one or more active gene copies of the present invention to an abnormally proliferating cell or cells. In a preferred embodiment, polynucleotides of the present invention is a DNA construct comprising a recombinant expression vector effective in expressing a DNA sequence encoding said polynucleotides. In another preferred embodiment of the present invention, the DNA construct encoding the poynucleotides of the present invention is inserted into cells to be treated utilizing a retrovirus, or more preferably an adenoviral vector (See G J. Nabel, et. al., PNAS 1999 96: 324-326, which is hereby incorporated by reference). In a most preferred embodiment, the viral vector is defective and will not transform non-proliferating cells, only proliferating cells. Moreover, in a preferred embodiment, the polynucleotides of the present invention inserted into proliferating cells either alone, or in combination with or fused to other polynucleotides, can then be modulated via an external stimulus (i.e. magnetic, specific small molecule, chemical, or drug administration, etc.), which acts upon the promoter upstream of said polynucleotides to induce expression of the encoded protein product. As such the beneficial therapeutic affect of the present invention may be expressly modulated (i.e. to increase, decrease, or inhibit expression of the present invention) based upon said external stimulus.

[0472] Polynucleotides of the present invention may be useful in repressing expression of oncogenic genes or antigens. By “repressing expression of the oncogenic genes” is intended the suppression of the transcription of the gene, the degradation of the gene transcript (premessage RNA), the inhibition of splicing, the destruction of the messenger RNA, the prevention of the post-translational modifications of the protein, the destruction of the protein, or the inhibition of the normal function of the protein.

[0473] For local administration to abnormally proliferating cells, polynucleotides of the present invention may be administered by any method known to those of skill in the art including, but not limited to transfection, electroporation, microinjection of cells, or in vehicles such as liposomes, lipofectin, or as naked polynucleotides, or any other method described throughout the specification. The polynucleotide of the present invention may be delivered by known gene delivery systems such as, but not limited to, retroviral vectors (Gilboa, J. Virology 44:845 (1982); Hocke, Nature 320:275 (1986); Wilson, et al., Proc. Natl. Acad. Sci. U.S.A. 85:3014), vaccinia virus system (Chakrabarty et al., Mol. Cell Biol. 5:3403 (1985) or other efficient DNA delivery systems (Yates et al., Nature 313:812 (1985)) known to those skilled in the art. These references are exemplary only and are hereby incorporated by reference. In order to specifically deliver or transfect cells which are abnormally proliferating and spare non-dividing cells, it is preferable to utilize a retrovirus, or adenoviral (as described in the art and elsewhere herein) delivery system known to those of skill in the art. Since host DNA replication is required for retroviral DNA to integrate and the retrovirus will be unable to self replicate due to the lack of the retrovirus genes needed for its life cycle. Utilizing such a retroviral delivery system for polynucleotides of the present invention will target said gene and constructs to abnormally proliferating cells and will spare the non-dividing normal cells.

[0474] The polynucleotides of the present invention may be delivered directly to cell proliferative disorder/disease sites in internal organs, body cavities and the like by use of imaging devices used to guide an injecting needle directly to the disease site. The polynucleotides of the present invention may also be administered to disease sites at the time of surgical intervention.

[0475] By “cell proliferative disease” is meant any human or animal disease or disorder, affecting any one or any combination of organs, cavities, or body parts, which is characterized by single or multiple local abnormal proliferations of cells, groups of cells, or tissues, whether benign or malignant.

[0476] Any amount of the polynucleotides of the present invention may be administered as long as it has a biologically inhibiting effect on the proliferation of the treated cells. Moreover, it is possible to administer more than one of the polynucleotide of the present invention simultaneously to the same site. By “biologically inhibiting” is meant partial or total growth inhibition as well as decreases in the rate of proliferation or growth of the cells. The biologically inhibitory dose may be determined by assessing the effects of the polynucleotides of the present invention on target malignant or abnormally proliferating cell growth in tissue culture, tumor growth in animals and cell cultures, or any other method known to one of ordinary skill in the art.

[0477] The present invention is further directed to antibody-based therapies which involve administering of anti-polypeptides and anti-polynucleotide antibodies to a mammalian, preferably human, patient for treating one or more of the described disorders. Methods for producing anti-polypeptides and anti-polynucleotide antibodies polyclonal and monoclonal antibodies are described in detail elsewhere herein. Such antibodies may be provided in pharmaceutically acceptable compositions as known in the art or as described herein.

[0478] A summary of the ways in which the antibodies of the present invention may be used therapeutically includes binding polynucleotides or polypeptides of the present invention locally or systemically in the body or by direct cytotoxicity of the antibody, e.g. as mediated by complement (CDC) or by effector cells (ADCC). Some of these approaches are described in more detail below. Armed with the teachings provided herein, one of ordinary skill in the art will know how to use the antibodies of the present invention for diagnostic, monitoring or therapeutic purposes without undue experimentation.

[0479] In particular, the antibodies, fragments and derivatives of the present invention are useful for treating a subject having or developing cell proliferative and/or differentiation disorders as described herein. Such treatment comprises administering a single or multiple doses of the antibody, or a fragment, derivative, or a conjugate thereof.

[0480] The antibodies of this invention may be advantageously utilized in combination with other monoclonal or chimeric antibodies, or with lymphokines or hematopoietic growth factors, for example., which serve to increase the number or activity of effector cells which interact with the antibodies.

[0481] It is preferred to use high affinity and/or potent in vivo inhibiting and/or neutralizing antibodies against polypeptides or polynucleotides of the present invention, fragments or regions thereof, for both immunoassays directed to and therapy of disorders related to polynucleotides or polypeptides, including fragements thereof, of the present invention. Such antibodies, fragments, or regions, will preferably have an affinity for polynucleotides or polypeptides, including fragements thereof. Preferred binding affinities include those with a dissociation constant or Kd less than 5×10⁻⁶M, 10⁻⁶M, 5×10⁻⁷M, 10⁻⁷M, 5×10⁻⁸M, 10⁻⁸M, 5×10⁻⁹M, 10⁻⁹M, 5×10⁻¹⁰M, 10⁻¹⁰M, 5×10⁻¹¹M, 10⁻¹¹M, 5×10⁻¹²M, 10⁻¹²M, 5×10⁻¹³M, 10⁻¹³M, 5×10⁻¹⁴M,10⁻¹⁴M, 5×10⁻¹⁵M, and 10⁻¹⁵M.

[0482] Moreover, polypeptides of the present invention are useful in inhibiting the angiogenesis of proliferative cells or tissues, either alone, as a protein fusion, or in combination with other polypeptides directly or indirectly, as described elsewhere herein. In a most preferred embodiment, said anti-angiogenesis effect may be achieved indirectly, for example, through the inhibition of hematopoietic, tumor-specific cells, such as tumor-associated macrophages (See Joseph I B, et al. J Natl Cancer Inst, 90(21):1648-53 (1998), which is hereby incorporated by reference). Antibodies directed to polypeptides or polynucleotides of the present invention may also result in inhibition of angiogenesis directly, or indirectly (See Witte L, et al., Cancer Metastasis Rev. 17(2):155-61 (1998), which is hereby incorporated by reference)).

[0483] Polypeptides, including protein fusions, of the present invention, or fragments thereof may be useful in inhibiting proliferative cells or tissues through the induction of apoptosis. Said polypeptides may act either directly, or indirectly to induce apoptosis of proliferative cells and tissues, for example in the activation of a death-domain receptor, such as tumor necrosis factor (TNF) receptor-1, CD95 (Fas/APO-1), TNF-receptor-related apoptosis-mediated protein (TRAMP) and TNF-related apoptosis-inducing ligand (TRAIL) receptor-1 and -2 (See Schulze-Osthoff K, et.al., Eur J Biochem 254(3):439-59 (1998), which is hereby incorporated by reference). Moreover, in another preferred embodiment of the present invention, said polypeptides may induce apoptosis through other mechanisms, such as in the activation of other proteins which will activate apoptosis, or through stimulating the expression of said proteins, either alone or in combination with small molecule drugs or adjuviants, such as apoptonin, galectins, thioredoxins, anti-inflammatory proteins (See for example, Mutat Res 400(1-2):447-55 (1998), Med Hypotheses.50(5):423-33 (1998), Chem Biol Interact. Apr 24;111-112:23-34 (1998), J Mol Med.76(6):402-12 (1998), Int J Tissue React;20(1):3-15 (1998), which are all hereby incorporated by reference).

[0484] Polypeptides, including protein fusions to, or fragments thereof, of the present invention are useful in inhibiting the metastasis of proliferative cells or tissues. Inhibition may occur as a direct result of administering polypeptides, or antibodies directed to said polypeptides as described elsewere herein, or indirectly, such as activating the expression of proteins known to inhibit metastasis, for example alpha 4 integrins, (See, e.g., Curr Top Microbiol Immunol 1998;231:125-41, which is hereby incorporated by reference). Such thereapeutic affects of the present invention may be achieved either alone, or in combination with small molecule drugs or adjuvants.

[0485] In another embodiment, the invention provides a method of delivering compositions containing the polypeptides of the invention (e.g., compositions containing polypeptides or polypeptide antibodes associated with heterologous polypeptides, heterologous nucleic acids, toxins, or prodrugs) to targeted cells expressing the polypeptide of the present invention. Polypeptides or polypeptide antibodes of the invention may be associated with with heterologous polypeptides, heterologous nucleic acids, toxins, or prodrugs via hydrophobic, hydrophilic, ionic and/or covalent interactions. Polypeptides, protein fusions to, or fragments thereof, of the present invention are useful in enhancing the immunogenicity and/or antigenicity of proliferating cells or tissues, either directly, such as would occur if the polypeptides of the present invention ‘vaccinated’ the immune response to respond to proliferative antigens and immunogens, or indirectly, such as in activating the expression of proteins known to enhance the immune response (e.g. chemokines), to said antigens and immunogens.

### Immune Activity

[0486] Polynucleotides, polypeptides, antibodies, and/or agonists or antagonists of the present invention may be useful in treating, preventing, diagnosing and/or prognosing diseases, disorders, and/or conditions of the immune system, by, for example, activating or inhibiting the proliferation, differentiation, or mobilization (chemotaxis) of immune cells. Immune cells develop through a process called hematopoiesis, producing myeloid (platelets, red blood cells, neutrophils, and macrophages) and lymphoid (B and T lymphocytes) cells from pluripotent stem cells. The etiology of these immune diseases, disorders, and/or conditions may be genetic, somatic, such as cancer and some autoimmune diseases, acquired (e.g., by chemotherapy or toxins), or infectious. Moreover, polynucleotides, polypeptides, antibodies, and/or agonists or antagonists of the present invention can be used as a marker or detector of a particular immune system disease or disorder.

[0487] In another embodiment, a polypeptide of the invention, or polynucleotides, antibodies, agonists, or antagonists corresponding to that polypeptide, may be used to treat diseases and disorders of the immune system and/or to inhibit or enhance an immune response generated by cells associated with the tissue(s) in which the polypeptide of the invention is expressed, including one, two, three, four, five, or more tissues disclosed in Table 1A, column 8 (Tissue Distribution Library Code).

[0488] Polynucleotides, polypeptides, antibodies, and/or agonists or antagonists of the present invention may be useful in treating, preventing, diagnosing, and/or prognosing immunodeficiencies, including both congenital and acquired immunodeficiencies. Examples of B cell immunodeficiencies in which immunoglobulin levels B cell function and/or B cell numbers are decreased include: X-linked agammaglobulinemia (Bruton's disease), X-linked infantile agammaglobulinemia, X-linked immunodeficiency with hyper IgM, non X-linked immunodeficiency with hyper IgM, X-linked lymphoproliferative syndrome (XLP), agammaglobulinemia including congenital and acquired agammaglobulinemia, adult onset agammaglobulinemia, late-onset agammaglobulinemia, dysgammaglobulinemia, hypogammaglobulinemia, unspecified hypogammaglobulinemia, recessive agammaglobulinemia (Swiss type), Selective IgM deficiency, selective IgA deficiency, selective IgG subclass deficiencies, IgG subclass deficiency (with or without IgA deficiency), Ig deficiency with increased IgM, IgG and IgA deficiency with increased IgM, antibody deficiency with normal or elevated Igs, Ig heavy chain deletions, kappa chain deficiency, B cell lymphoproliferative disorder (BLPD), common variable immunodeficiency (CVID), common variable immunodeficiency (CVI) (acquired), and transient hypogammaglobulinemia of infancy.

[0489] In specific embodiments, ataxia-telangiectasia or conditions associated with ataxia-telangiectasia are treated, prevented, diagnosed, and/or prognosing using the polypeptides or polynucleotides of the invention, and/or agonists or antagonists thereof.

[0490] Examples of congenital immunodeficiencies in which T cell and/or B cell function and/or number is decreased include, but are not limited to: DiGeorge anomaly, severe combined immunodeficiencies (SCID) (including, but not limited to, X-linked SCID, autosomal recessive SCID, adenosine deaminase deficiency, purine nucleoside phosphorylase (PNP) deficiency, Class II MHC deficiency (Bare lymphocyte syndrome), Wiskott-Aldrich syndrome, and ataxia telangiectasia), thymic hypoplasia, third and fourth pharyngeal pouch syndrome, 22q11.2 deletion, chronic mucocutaneous candidiasis, natural killer cell deficiency (NK), idiopathic CD4+ T-lymphocytopenia, immunodeficiency with predominant T cell defect (unspecified), and unspecified immunodeficiency of cell mediated immunity.

[0491] In specific embodiments, DiGeorge anomaly or conditions associated with DiGeorge anomaly are treated, prevented, diagnosed, and/or prognosed using polypeptides or polynucleotides of the invention, or antagonists or agonists thereof.

[0492] Other immunodeficiencies that may be treated, prevented, diagnosed, and/or prognosed using polypeptides or polynucleotides of the invention, and/or agonists or antagonists thereof, include, but are not limited to, chronic granulomatous disease, Chédiak-Higashi syndrome, myeloperoxidase deficiency, leukocyte glucose-6-phosphate dehydrogenase deficiency, X-linked lymphoproliferative syndrome (XLP), leukocyte adhesion deficiency, complement component deficiencies (including C1, C2, C3, C4, C5, C6, C7, C8 and/or C9 deficiencies), reticular dysgenesis, thymic alymphoplasia-aplasia, immunodeficiency with thymoma, severe congenital leukopenia, dysplasia with immunodeficiency, neonatal neutropenia, short limbed dwarfism, and Nezelof syndrome-combined immunodeficiency with Igs.

[0493] In a preferred embodiment, the immunodeficiencies and/or conditions associated with the immunodeficiencies recited above are treated, prevented, diagnosed and/or prognosed using polynucleotides, polypeptides, antibodies, and/or agonists or antagonists of the present invention.

[0494] In a preferred embodiment polynucleotides, polypeptides, antibodies, and/or agonists or antagonists of the present invention could be used as an agent to boost immunoresponsiveness among immunodeficient individuals. In specific embodiments, polynucleotides, polypeptides, antibodies, and/or agonists or antagonists of the present invention could be used as an agent to boost immunoresponsiveness among B cell and/or T cell immunodeficient individuals.

[0495] The polynucleotides, polypeptides, antibodies, and/or agonists or antagonists of the present invention may be useful in treating, preventing, diagnosing and/or prognosing autoimmune disorders. Many autoimmune disorders result from inappropriate recognition of self as foreign material by immune cells. This inappropriate recognition results in an immune response leading to the destruction of the host tissue. Therefore, the administration of polynucleotides and polypeptides of the invention that can inhibit an immune response, particularly the proliferation, differentiation, or chemotaxis of T-cells, may be an effective therapy in preventing autoimmune disorders.

[0496] Autoimmune diseases or disorders that may be treated, prevented, diagnosed and/or prognosed by polynucleotides, polypeptides, antibodies, and/or agonists or antagonists of the present invention include, but are not limited to, one or more of the following: systemic lupus erythematosus, rheumatoid arthritis, ankylosing spondylitis, multiple sclerosis, autoimmune thyroiditis, Hashimoto's thyroiditis, autoimmune hemolytic anemia, hemolytic anemia, thrombocytopenia, autoimmune thrombocytopenia purpura, autoimmune neonatal thrombocytopenia, idiopathic thrombocytopenia purpura, purpura (e.g., Henloch-Scoenlein purpura), autoimmunocytopenia, Goodpasture's syndrome, Pemphigus vulgaris, myasthenia gravis, Grave's disease (hyperthyroidism), and insulin-resistant diabetes mellitus.

[0497] Additional disorders that are likely to have an autoimmune component that may be treated, prevented, and/or diagnosed with the compositions of the invention include, but are not limited to, type II collagen-induced arthritis, antiphospholipid syndrome, dermatitis, allergic encephalomyelitis, myocarditis, relapsing polychondritis, rheumatic heart disease, neuritis, uveitis ophthalmia, polyendocrinopathies, Reiter's Disease, Stiff-Man Syndrome, autoimmune pulmonary inflammation, autism, Guillain-Barre Syndrome, insulin dependent diabetes mellitus, and autoimmune inflammatory eye disorders.

[0498] Additional disorders that are likely to have an autoimmune component that may be treated, prevented, diagnosed and/or prognosed with the compositions of the invention include, but are not limited to, scleroderna with anti-collagen antibodies (often characterized, e.g., by nucleolar and other nuclear antibodies), mixed connective tissue disease (often characterized, e.g., by antibodies to extractable nuclear antigens (e.g., ribonucleoprotein)), polymyositis (often characterized, e.g., by nonhistone ANA), pernicious anemia (often characterized, e.g., by antiparietal cell, microsomes, and intrinsic factor antibodies), idiopathic Addison's disease (often characterized, e.g., by humoral and cell-mediated adrenal cytotoxicity, infertility (often characterized, e.g., by antispermatozoal antibodies), glomerulonephritis (often characterized, e.g., by glomerular basement membrane antibodies or immune complexes), bullous pemphigoid (often characterized, e.g., by IgG and complement in basement membrane), Sjogren's syndrome (often characterized, e.g., by multiple tissue antibodies, and/or a specific nonhistone ANA (SS-B)), diabetes mellitus (often characterized, e.g., by cell-mediated and humoral islet cell antibodies), and adrenergic drug resistance (including adrenergic drug resistance with asthma or cystic fibrosis) (often characterized, e.g., by beta-adrenergic receptor antibodies).

[0499] Additional disorders that may have an autoimmune component that may be treated, prevented, diagnosed and/or prognosed with the compositions of the invention include, but are not limited to, chronic active hepatitis (often characterized, e.g., by smooth muscle antibodies), primary biliary cirrhosis (often characterized, e.g., by mitochondria antibodies), other endocrine gland failure (often characterized, e.g., by specific tissue antibodies in some cases), vitiligo (often characterized, e.g., by melanocyte antibodies), vasculitis (often characterized, e.g., by Ig and complement in vessel walls and/or low serum complement), post-MI (often characterized, e.g., by myocardial antibodies), cardiotomy syndrome (often characterized, e.g., by myocardial antibodies), urticaria (often characterized, e.g., by IgG and IgM antibodies to IgE), atopic dermatitis (often characterized, e.g., by IgG and IgM antibodies to IgE), asthma (often characterized, e.g., by IgG and IgM antibodies to IgE), and many other inflammatory, granulomatous, degenerative, and atrophic disorders.

[0500] In a preferred embodiment, the autoimmune diseases and disorders and/or conditions associated with the diseases and disorders recited above are treated, prevented, diagnosed and/or prognosed using for example, antagonists or agonists, polypeptides or polynucleotides, or antibodies of the present invention. In a specific preferred embodiment, rheumatoid arthritis is treated, prevented, and/or diagnosed using polynucleotides, polypeptides, antibodies, and/or agonists or antagonists of the present invention.

[0501] In another specific preferred embodiment, systemic lupus erythematosus is treated, prevented, and/or diagnosed using polynucleotides, polypeptides, antibodies, and/or agonists or antagonists of the present invention. In another specific preferred embodiment, idiopathic thrombocytopenia purpura is treated, prevented, and/or diagnosed using polynucleotides, polypeptides, antibodies, and/or agonists or antagonists of the present invention.

[0502] In another specific preferred embodiment IgA nephropathy is treated, prevented, and/or diagnosed using polynucleotides, polypeptides, antibodies, and/or agonists or antagonists of the present invention.

[0503] In a preferred embodiment, the autoimmune diseases and disorders and/or conditions associated with the diseases and disorders recited above are treated, prevented, diagnosed and/or prognosed using polynucleotides, polypeptides, antibodies, and/or agonists or antagonists of the present invention

[0504] In preferred embodiments, polypeptides, antibodies, polynucleotides and/or agonists or antagonists of the present invention are used as a immunosuppressive agent(s).

[0505] Polynucleotides, polypeptides, antibodies, and/or agonists or antagonists of the present invention may be useful in treating, preventing, prognosing, and/or diagnosing diseases, disorders, and/or conditions of hematopoietic cells. Polynucleotides, polypeptides, antibodies, and/or agonists or antagonists of the present invention could be used to increase differentiation and proliferation of hematopoietic cells, including the pluripotent stem cells, in an effort to treat or prevent those diseases, disorders, and/or conditions associated with a decrease in certain (or many) types hematopoietic cells, including but not limited to, leukopenia, neutropenia, anemia, and thrombocytopenia. Alternatively, Polynucleotides, polypeptides, antibodies, and/or agonists or antagonists of the present invention could be used to increase differentiation and proliferation of hematopoietic cells, including the pluripotent stem cells, in an effort to treat or prevent those diseases, disorders, and/or conditions associated with an increase in certain (or many) types of hematopoietic cells, including but not limited to, histiocytosis.

[0506] Allergic reactions and conditions, such as asthma (particularly allergic asthma) or other respiratory problems, may also be treated, prevented, diagnosed and/or prognosed using polypeptides, antibodies, or polynucleotides of the invention, and/or agonists or antagonists thereof. Moreover, these molecules can be used to treat, prevent, prognose, and/or diagnose anaphylaxis, hypersensitivity to an antigenic molecule, or blood group incompatibility.

[0507] Additionally, polypeptides or polynucleotides of the invention, and/or agonists or antagonists thereof, may be used to treat, prevent, diagnose and/or prognose IgE-mediated allergic reactions. Such allergic reactions include, but are not limited to, asthma, rhinitis, and eczema. In specific embodiments, polynucleotides, polypeptides, antibodies, and/or agonists or antagonists of the present invention may be used to modulate IgE concentrations in vitro or in vivo.

[0508] Moreover, polynucleotides, polypeptides, antibodies, and/or agonists or antagonists of the present invention have uses in the diagnosis, prognosis, prevention, and/or treatment of inflammatory conditions. For example, since polypeptides, antibodies, or polynucleotides of the invention, and/or agonists or antagonists of the invention may inhibit the activation, proliferation and/or differentiation of cells involved in an inflammatory response, these molecules can be used to prevent and/or treat chronic and acute inflammatory conditions. Such inflammatory conditions include, but are not limited to, for example, inflammation associated with infection (e.g., septic shock, sepsis, or systemic inflammatory response syndrome), ischemia-reperfusion injury, endotoxin lethality, complement-mediated hyperacute rejection, nephritis, cytokine or chemokine induced lung injury, inflammatory bowel disease, Crohn's disease, over production of cytokines (e.g., TNF or IL-1.), respiratory disorders (e.g., asthma and allergy); gastrointestinal disorders (e.g., inflammatory bowel disease); cancers (e.g., gastric, ovarian, lung, bladder, liver, and breast); CNS disorders (e.g., multiple sclerosis; ischemic brain injury and/or stroke, traumatic brain injury, neurodegenerative disorders (e.g., Parkinson's disease and Alzheimer's disease); AIDS-related dementia; and prion disease); cardiovascular disorders (e.g., atherosclerosis, myocarditis, cardiovascular disease, and cardiopulmonary bypass complications); as well as many additional diseases, conditions, and disorders that are characterized by inflammation (e.g., hepatitis, rheumatoid arthritis, gout, trauma, pancreatitis, sarcoidosis, dermatitis, renal ischemia-reperfusion injury, Grave's disease, systemic lupus erythematosus, diabetes mellitus, and allogenic transplant rejection).

[0509] Because inflammation is a fundamental defense mechanism, inflammatory disorders can effect virtually any tissue of the body. Accordingly, polynucleotides, polypeptides, and antibodies of the invention, as well as agonists or antagonists thereof, have uses in the treatment of tissue-specific inflammatory disorders, including, but not limited to, adrenalitis, alveolitis, angiocholecystitis, appendicitis, balanitis, blepharitis, bronchitis, bursitis, carditis, cellulitis, cervicitis, cholecystitis, chorditis, cochlitis, colitis, conjunctivitis, cystitis, dermatitis, diverticulitis, encephalitis, endocarditis, esophagitis, eustachitis, fibrositis, folliculitis, gastritis, gastroenteritis, gingivitis, glossitis, hepatosplenitis, keratitis, labyrinthitis, laryngitis, lymphangitis, mastitis, media otitis, meningitis, metritis, mucitis, myocarditis, myosititis, myringitis, nephritis, neuritis, orchitis, osteochondritis, otitis, pericarditis, peritendonitis, peritonitis, pharyngitis, phlebitis, poliomyelitis, prostatitis, pulpitis, retinitis, rhinitis, salpingitis, scleritis, sclerochoroiditis, scrotitis, sinusitis, spondylitis, steatitis, stomatitis, synovitis, syringitis, tendonitis, tonsillitis, urethritis, and vaginitis.

[0510] In specific embodiments, polypeptides, antibodies, or polynucleotides of the invention, and/or agonists or antagonists thereof, are useful to diagnose, prognose, prevent, and/or treat organ transplant rejections and graft-versus-host disease. Organ rejection occurs by host immune cell destruction of the transplanted tissue through an immune response. Similarly, an immune response is also involved in GVHD, but, in this case, the foreign transplanted immune cells destroy the host tissues. Polypeptides, antibodies, or polynucleotides of the invention, and/or agonists or antagonists thereof, that inhibit an immune response, particularly the activation, proliferation, differentiation, or chemotaxis of T-cells, may be an effective therapy in preventing organ rejection or GVHD. In specific embodiments, polypeptides, antibodies, or polynucleotides of the invention, and/or agonists or antagonists thereof, that inhibit an immune response, particularly the activation, proliferation, differentiation, or chemotaxis of T-cells, may be an effective therapy in preventing experimental allergic and hyperacute xenograft rejection.

[0511] In other embodiments, polypeptides, antibodies, or polynucleotides of the invention, and/or agonists or antagonists thereof, are useful to diagnose, prognose, prevent, and/or treat immune complex diseases, including, but not limited to, serum sickness, post streptococcal glomerulonephritis, polyarteritis nodosa, and immune complex-induced vasculitis.

[0512] Polypeptides, antibodies, polynucleotides and/or agonists or antagonists of the invention can be used to treat, detect, and/or prevent infectious agents. For example, by increasing the immune response, particularly increasing the proliferation activation and/or differentiation of B and/or T cells, infectious diseases may be treated, detected, and/or prevented. The immune response may be increased by either enhancing an existing immune response, or by initiating a new immune response. Alternatively, polynucleotides, polypeptides, antibodies, and/or agonists or antagonists of the present invention may also directly inhibit the infectious agent (refer to section of application listing infectious agents, etc), without necessarily eliciting an immune response.

[0513] In another embodiment, polypeptides, antibodies, polynucleotides and/or agonists or antagonists of the present invention are used as a vaccine adjuvant that enhances immune responsiveness to an antigen. In a specific embodiment, polypeptides, antibodies, polynucleotides and/or agonists or antagonists of the present invention are used as an adjuvant to enhance tumor-specific immune responses.

[0514] In another specific embodiment, polypeptides, antibodies, polynucleotides and/or agonists or antagonists of the present invention are used as an adjuvant to enhance anti-viral immune responses. Anti-viral immune responses that may be enhanced using the compositions of the invention as an adjuvant, include virus and virus associated diseases or symptoms described herein or otherwise known in the art. In specific embodiments, the compositions of the invention are used as an adjuvant to enhance an immune response to a virus, disease, or symptom selected from the group consisting of: AIDS, meningitis, Dengue, EBV, and hepatitis (e.g., hepatitis B). In another specific embodiment, the compositions of the invention are used as an adjuvant to enhance an immune response to a virus, disease, or symptom selected from the group consisting of: HIV/AIDS, respiratory syncytial virus, Dengue, rotavirus, Japanese B encephalitis, influenza A and B, parainfluenza, measles, cytomegalovirus, rabies, Junin, Chikungunya, Rift Valley Fever, herpes simplex, and yellow fever.

[0515] In another specific embodiment, polypeptides, antibodies, polynucleotides and/or agonists or antagonists of the present invention are used as an adjuvant to enhance anti-bacterial or anti-fungal immune responses. Anti-bacterial or anti-fungal immune responses that may be enhanced using the compositions of the invention as an adjuvant, include bacteria or fungus and bacteria or fungus associated diseases or symptoms described herein or otherwise known in the art. In specific embodiments, the compositions of the invention are used as an adjuvant to enhance an immune response to a bacteria or fungus, disease, or symptom selected from the group consisting of: tetanus, Diphtheria, botulism, and meningitis type B.

[0516] In another specific embodiment, the compositions of the invention are used as an adjuvant to enhance an immune response to a bacteria or fungus, disease, or symptom selected from the group consisting of: Vibrio cholerae, Mycobacterium leprae, Salmonella typhi, Salmonella paratyphi, Meisseria meningitidis, Streptococcus pneumoniae, Group B streptococcus, Shigella spp., Enterotoxigenic Escherichia coli, Enterohemorrhagic E. coli, and Borrelia burgdorferi.

[0517] In another specific embodiment, polypeptides, antibodies, polynucleotides and/or agonists or antagonists of the present invention are used as an adjuvant to enhance anti-parasitic immune responses. Anti-parasitic immune responses that may be enhanced using the compositions of the invention as an adjuvant, include parasite and parasite associated diseases or symptoms described herein or otherwise known in the art In specific embodiments, the compositions of the invention are used as an adjuvant to enhance an immune response to a parasite. In another specific embodiment, the compositions of the invention are used as an adjuvant to enhance an immune response to Plasmodium (malaria) or Leishmania.

[0518] In another specific embodiment, polypeptides, antibodies, polynucleotides and/or agonists or antagonists of the present invention may also be employed to treat infectious diseases including silicosis, sarcoidosis, and idiopathic pulmonary fibrosis; for example, by preventing the recruitment and activation of mononuclear phagocytes.

[0519] In another specific embodiment, polypeptides, antibodies, polynucleotides and/or agonists or antagonists of the present invention are used as an antigen for the generation of antibodies to inhibit or enhance immune mediated responses against polypeptides of the invention.

[0520] In one embodiment, polypeptides, antibodies, polynucleotides and/or agonists or antagonists of the present invention are administered to an animal (e.g., mouse, rat, rabbit, hamster, guinea pig, pigs, micro-pig, chicken, camel, goat, horse, cow, sheep, dog, cat, non-human primate, and human, most preferably human) to boost the immune system to produce increased quantities of one or more antibodies (e.g., IgG, IgA, IgM, and IgE), to induce higher affinity antibody production and immunoglobulin class switching (e.g., IgG, IgA, IgM, and IgE), and/or to increase an immune response.

[0521] In another specific embodiment, polypeptides, antibodies, polynucleotides and/or agonists or antagonists of the present invention are used as a stimulator of B cell responsiveness to pathogens.

[0522] In another specific embodiment, polypeptides, antibodies, polynucleotides and/or agonists or antagonists of the present invention are used as an activator of T cells.

[0523] In another specific embodiment, polypeptides, antibodies, polynucleotides and/or agonists or antagonists of the present invention are used as an agent that elevates the immune status of an individual prior to their receipt of immunosuppressive therapies.

[0524] In another specific embodiment, polypeptides, antibodies, polynucleotides and/or agonists or antagonists of the present invention are used as an agent to induce higher affinity antibodies.

[0525] In another specific embodiment, polypeptides, antibodies, polynucleotides and/or agonists or antagonists of the present invention are used as an agent to increase serum immunoglobulin concentrations.

[0526] In another specific embodiment, polypeptides, antibodies, polynucleotides and/or agonists or antagonists of the present invention are used as an agent to accelerate recovery of immunocompromised individuals.

[0527] In another specific embodiment, polypeptides, antibodies, polynucleotides and/or agonists or antagonists of the present invention are used as an agent to boost immunoresponsiveness among aged populations and/or neonates.

[0528] In another specific embodiment, polypeptides, antibodies, polynucleotides and/or agonists or antagonists of the present invention are used as an immune system enhancer prior to, during, or after bone marrow transplant and/or other transplants (e.g., allogeneic or xenogeneic organ transplantation). With respect to transplantation, compositions of the invention may be administered prior to, concomitant with, and/or after transplantation. In a specific embodiment, compositions of the invention are administered after transplantation, prior to the beginning of recovery of T-cell populations. In another specific embodiment, compositions of the invention are first administered after transplantation after the beginning of recovery of T cell populations, but prior to full recovery of B cell populations.

[0529] In another specific embodiment, polypeptides, antibodies, polynucleotides and/or agonists or antagonists of the present invention are used as an agent to boost immunoresponsiveness among individuals having an acquired loss of B cell function. Conditions resulting in an acquired loss of B cell function that may be ameliorated or treated by administering the polypeptides, antibodies, polynucleotides and/or agonists or antagonists thereof, include, but are not limited to, HIV Infection, AIDS, bone marrow transplant, and B cell chronic lymphocytic leukemia (CLL).

[0530] In another specific embodiment, polypeptides, antibodies, polynucleotides and/or agonists or antagonists of the present invention are used as an agent to boost immunoresponsiveness among individuals having a temporary immune deficiency. Conditions resulting in a temporary immune deficiency that may be ameliorated or treated by administering the polypeptides, antibodies, polynucleotides and/or agonists or antagonists thereof, include, but are not limited to, recovery from viral infections (e.g., influenza), conditions associated with malnutrition, recovery from infectious mononucleosis, or conditions associated with stress, recovery from measles, recovery from blood transfusion, and recovery from surgery.

[0531] In another specific embodiment, polypeptides, antibodies, polynucleotides and/or agonists or antagonists of the present invention are used as a regulator of antigen presentation by monocytes, dendritic cells, and/or B-cells. In one embodiment, polynucleotides, polypeptides, antibodies, and/or agonists or antagonists of the present invention enhance antigen presentation or antagonizes antigen presentation in vitro or in vivo. Moreover, in related embodiments, said enhancement or antagonism of antigen presentation may be useful as an anti-tumor treatment or to modulate the immune system.

[0532] In another specific embodiment, polypeptides, antibodies, polynucleotides and/or agonists or antagonists of the present invention are used as an agent to direct an individual's immune system towards development of a humoral response (i.e. TH2) as opposed to a TH1 cellular response.

[0533] In another specific embodiment, polypeptides, antibodies, polynucleotides and/or agonists or antagonists of the present invention are used as a means to induce tumor proliferation and thus make it more susceptible to anti-neoplastic agents. For example, multiple myeloma is a slowly dividing disease and is thus refractory to virtually all anti-neoplastic regimens. If these cells were forced to proliferate more rapidly their susceptibility profile would likely change.

[0534] In another specific embodiment, polypeptides, antibodies, polynucleotides and/or agonists or antagonists of the present invention are used as a stimulator of B cell production in pathologies such as AIDS, chronic lymphocyte disorder and/or Common Variable Immunodificiency.

[0535] In another specific embodiment, polypeptides, antibodies, polynucleotides and/or agonists or antagonists of the present invention are used as a therapy for generation and/or regeneration of lymphoid tissues following surgery, trauma or genetic defect. In another specific embodiment, polypeptides, antibodies, polynucleotides and/or agonists or antagonists of the present invention are used in the pretreatment of bone marrow samples prior to transplant.

[0536] In another specific embodiment, polypeptides, antibodies, polynucleotides and/or agonists or antagonists of the present invention are used as a gene-based therapy for genetically inherited disorders resulting in immuno-incompetence/immunodeficiency such as observed among SCID patients.

[0537] In another specific embodiment, polypeptides, antibodies, polynucleotides and/or agonists or antagonists of the present invention are used as a means of activating monocytes/macrophages to defend against parasitic diseases that effect monocytes such as Leishmania.

[0538] In another specific embodiment, polypeptides, antibodies, polynucleotides and/or agonists or antagonists of the present invention are used as a means of regulating secreted cytokines that are elicited by polypeptides of the invention.

[0539] In another embodiment, polypeptides, antibodies, polynucleotides and/or agonists or antagonists of the present invention are used in one or more of the applications decribed herein, as they may apply to veterinary medicine.

[0540] In another specific embodiment, polypeptides, antibodies, polynucleotides and/or agonists or antagonists of the present invention are used as a means of blocking various aspects of immune responses to foreign agents or self. Examples of diseases or conditions in which blocking of certain aspects of immune responses may be desired include autoimmune disorders such as lupus, and arthritis, as well as immunoresponsiveness to skin allergies, inflammation, bowel disease, injury and diseases/disorders associated with pathogens.

[0541] In another specific embodiment, polypeptides, antibodies, polynucleotides and/or agonists or antagonists of the present invention are used as a therapy for preventing the B cell proliferation and Ig secretion associated with autoimmune diseases such as idiopathic thrombocytopenic purpura, systemic lupus erythematosus and multiple sclerosis.

[0542] In another specific embodiment, polypeptides, antibodies, polynucleotides and/or agonists or antagonists of the present invention are used as a inhibitor of B and/or T cell migration in endothelial cells. This activity disrupts tissue architecture or cognate responses and is useful, for example in disrupting immune responses, and blocking sepsis.

[0543] In another specific embodiment, polypeptides, antibodies, polynucleotides and/or agonists or antagonists of the present invention are used as a therapy for chronic hypergammaglobulinemia evident in such diseases as monoclonal gammopathy of undetermined significance (MGUS), Waldenstrom's disease, related idiopathic monoclonal gammopathies, and plasmacytomas.

[0544] In another specific embodiment, polypeptides, antibodies, polynucleotides and/or agonists or antagonists of the present invention may be employed for instance to inhibit polypeptide chemotaxis and activation of macrophages and their precursors, and of neutrophils, basophils, B lymphocytes and some T-cell subsets, e.g., activated and CD8 cytotoxic T cells and natural killer cells, in certain autoimmune and chronic inflammatory and infective diseases. Examples of autoimmune diseases are described herein and include multiple sclerosis, and insulin-dependent diabetes.

[0545] The polypeptides, antibodies, polynucleotides and/or agonists or antagonists of the present invention may also be employed to treat idiopathic hyper-eosinophilic syndrome by, for example, preventing eosinophil production and migration.

[0546] In another specific embodiment, polypeptides, antibodies, polynucleotides and/or agonists or antagonists of the present invention are used to enhance or inhibit complement mediated cell lysis.

[0547] In another specific embodiment, polypeptides, antibodies, polynucleotides and/or agonists or antagonists of the present invention are used to enhance or inhibit antibody dependent cellular cytotoxicity.

[0548] In another specific embodiment, polypeptides, antibodies, polynucleotides and/or agonists or antagonists of the present invention may also be employed for treating atherosclerosis, for example, by preventing monocyte infiltration in the artery wall.

[0549] In another specific embodiment, polypeptides, antibodies, polynucleotides and/or agonists or antagonists of the present invention may be employed to treat adult respiratory distress syndrome (ARDS).

[0550] In another specific embodiment, polypeptides, antibodies, polynucleotides and/or agonists or antagonists of the present invention may be useful for stimulating wound and tissue repair, stimulating angiogenesis, and/or stimulating the repair of vascular or lymphatic diseases or disorders. Additionally, agonists and antagonists of the invention may be used to stimulate the regeneration of mucosal surfaces.

[0551] In a specific embodiment, polynucleotides or polypeptides, and/or agonists thereof are used to diagnose, prognose, treat, and/or prevent a disorder characterized by primary or acquired immunodeficiency, deficient serum immunoglobulin production, recurrent infections, and/or immune system dysfunction. Moreover, polynucleotides or polypeptides, and/or agonists thereof may be used to treat or prevent infections of the joints, bones, skin, and/or parotid glands, blood-borne infections (e.g., sepsis, meningitis, septic arthritis, and/or osteomyelitis), autoimmune diseases (e.g., those disclosed herein), inflammatory disorders, and malignancies, and/or any disease or disorder or condition associated with these infections, diseases, disorders and/or malignancies) including, but not limited to, CVID, other primary immune deficiencies, HIV disease, CLL, recurrent bronchitis, sinusitis, otitis media, conjunctivitis, pneumonia, hepatitis, meningitis, herpes zoster (e.g., severe herpes zoster), and/or pneumocystis carnii. Other diseases and disorders that may be prevented, diagnosed, prognosed, and/or treated with polynucleotides or polypeptides, and/or agonists of the present invention include, but are not limited to, HIV infection, HTLV-BLV infection, lymphopenia, phagocyte bactericidal dysfunction anemia, thrombocytopenia, and hemoglobinuria.

[0552] In another embodiment, polynucleotides, polypeptides, antibodies, and/or agonists or antagonists of the present invention are used to treat, and/or diagnose an individual having common variable immunodeficiency disease (“CVID”; also known as “acquired agammaglobulinemia” and “acquired hypogammaglobulinemia”) or a subset of this disease.

[0553] In a specific embodiment, polynucleotides, polypeptides, antibodies, and/or agonists or antagonists of the present invention may be used to diagnose, prognose, prevent, and/or treat cancers or neoplasms including immune cell or immune tissue-related cancers or neoplasms. Examples of cancers or neoplasms that may be prevented, diagnosed, or treated by polynucleotides, polypeptides, antibodies, and/or agonists or antagonists of the present invention include, but are not limited to, acute myelogenous leukemia, chronic myelogenous leukemia, Hodgkin's disease, non-Hodgkin's lymphoma, acute lymphocytic anemia (ALL) Chronic lymphocyte leukemia, plasmacytomas, multiple myeloma, Burkitt's lymphoma, EBV-transformed diseases, and/or diseases and disorders described in the section entitled “Hyperproliferative Disorders” elsewhere herein.

[0554] In another specific embodiment, polypeptides, antibodies, polynucleotides and/or agonists or antagonists of the present invention are used as a therapy for decreasing cellular proliferation of Large B-cell Lymphomas.

[0555] In another specific embodiment, polypeptides, antibodies, polynucleotides and/or agonists or antagonists of the present invention are used as a means of decreasing the involvement of B cells and Ig associated with Chronic Myelogenous Leukemia.

[0556] In specific embodiments, the compositions of the invention are used as an agent to boost immunoresponsiveness among B cell immunodeficient individuals, such as, for example, an individual who has undergone a partial or complete splenectomy.

[0557] Antagonists of the invention include, for example, binding and/or inhibitory antibodies, antisense nucleic acids, ribozymes or soluble forms of the polypeptides of the present invention (e.g., Fc fusion protein; see, e.g., Example 9). Agonists of the invention include, for example, binding or stimulatory antibodies, and soluble forms of the polypeptides (e.g., Fc fusion proteins; see, e.g., Example 9). polypeptides, antibodies, polynucleotides and/or agonists or antagonists of the present invention may be employed in a composition with a pharmaceutically acceptable carrier, e.g., as described herein.

[0558] In another embodiment, polypeptides, antibodies, polynucleotides and/or agonists or antagonists of the present invention are administered to an animal (including, but not limited to, those listed above, and also including transgenic animals) incapable of producing functional endogenous antibody molecules or having an otherwise compromised endogenous immune system, but which is capable of producing human immunoglobulin molecules by means of a reconstituted or partially reconstituted immune system from another animal (see, e.g., published PCT Application Nos. WO98/24893, WO/9634096, WO/9633735, and WO/9110741). Administration of polypeptides, antibodies, polynucleotides and/or agonists or antagonists of the present invention to such animals is useful for the generation of monoclonal antibodies against the polypeptides, antibodies, polynucleotides and/or agonists or antagonists of the present invention.

### Blood-Related Disorders

[0559] The polynucleotides, polypeptides, antibodies, and/or agonists or antagonists of the present invention may be used to modulate hemostatic (the stopping of bleeding) or thrombolytic (clot dissolving) activity. For example, by increasing hemostatic or thrombolytic activity, polynucleotides or polypeptides, and/or agonists or antagonists of the present invention could be used to treat or prevent blood coagulation diseases, disorders, and/or conditions (e.g., afibrinogenemia, factor deficiencies, hemophilia), blood platelet diseases, disorders, and/or conditions (e.g., thrombocytopenia), or wounds resulting from trauma, surgery, or other causes. Alternatively, polynucleotides, polypeptides, antibodies, and/or agonists or antagonists of the present invention that can decrease hemostatic or thrombolytic activity could be used to inhibit or dissolve clotting. These molecules could be important in the treatment or prevention of heart attacks (infarction), strokes, or scarring.

[0560] In specific embodiments, the polynucleotides, polypeptides, antibodies, and/or agonists or antagonists of the present invention may be used to prevent, diagnose, prognose, and/or treat thrombosis, arterial thrombosis, venous thrombosis, thromboembolism, pulmonary embolism, atherosclerosis, myocardial infarction, transient ischemic attack, unstable angina. In specific embodiments, the polynucleotides, polypeptides, antibodies, and/or agonists or antagonists of the present invention may be used for the prevention of occulsion of saphenous grafts, for reducing the risk of periprocedural thrombosis as might accompany angioplasty procedures, for reducing the risk of stroke in patients with atrial fibrillation including nonrheumatic atrial fibrillation, for reducing the risk of embolism associated with mechanical heart valves and or mitral valves disease. Other uses for the polynucleotides, polypeptides, antibodies, and/or agonists or antagonists of the present invention, include, but are not limited to, the prevention of occlusions in extrcorporeal devices (e.g., intravascular canulas, vascular access shunts in hemodialysis patients, hemodialysis machines, and cardiopulmonary bypass machines).

[0561] In another embodiment, a polypeptide of the invention, or polynucleotides, antibodies, agonists, or antagonists corresponding to that polypeptide, may be used to prevent, diagnose, prognose, and/or treat diseases and disorders of the blood and/or blood forming organs associated with the tissue(s) in which the polypeptide of the invention is expressed, including one, two, three, four, five, or more tissues disclosed in Table 1A, column 8 (Tissue Distribution Library Code).

[0562] The polynucleotides, polypeptides, antibodies, and/or agonists or antagonists of the present invention may be used to modulate hematopoietic activity (the formation of blood cells). For example, the polynucleotides, polypeptides, antibodies, and/or agonists or antagonists of the present invention may be used to increase the quantity of all or subsets of blood cells, such as, for example, erythrocytes, lymphocytes (B or T cells), myeloid cells (e.g., basophils, eosinophils, neutrophils, mast cells, macrophages) and platelets. The ability to decrease the quantity of blood cells or subsets of blood cells may be useful in the prevention, detection, diagnosis and/or treatment of anemias and leukopenias described below. Alternatively, the polynucleotides, polypeptides, antibodies, and/or agonists or antagonists of the present invention may be used to decrease the quantity of all or subsets of blood cells, such as, for example, erythrocytes, lymphocytes (B or T cells), myeloid cells (e.g., basophils, eosinophils, neutrophils, mast cells, macrophages) and platelets.. The ability to decrease the quantity of blood cells or subsets of blood cells may be useful in the prevention, detection, diagnosis and/or treatment of leukocytoses, such as, for example eosinophilia.

[0563] The polynucleotides, polypeptides, antibodies, and/or agonists or antagonists of the present invention may be used to prevent, treat, or diagnose blood dyscrasia.

[0564] Anemias are conditions in which the number of red blood cells or amount of hemoglobin (the protein that carries oxygen) in them is below normal. Anemia may be caused by excessive bleeding, decreased red blood cell production, or increased red blood cell destruction (hemolysis). The polynucleotides, polypeptides, antibodies, and/or agonists or antagonists of the present invention may be useful in treating, preventing, and/or diagnosing anemias. Anemias that may be treated prevented or diagnosed by the polynucleotides, polypeptides, antibodies, and/or agonists or antagonists of the present invention include iron deficiency anemia, hypochromic anemia, microcytic anemia, chlorosis, hereditary siderob;astic anemia, idiopathic acquired sideroblastic anemia, red cell aplasia, megaloblastic anemia (e.g., pernicious anemia, (vitamin B12 deficiency) and folic acid deficiency anemia), aplastic anemia, hemolytic anemias (e.g., autoimmune helolytic anemia, microangiopathic hemolytic anemia, and paroxysmal nocturnal hemoglobinuria). The polynucleotides, polypeptides, antibodies, and/or agonists or antagonists of the present invention may be useful in treating, preventing, and/or diagnosing anemias associated with diseases including but not limited to, anemias associated with systemic lupus erythematosus, cancers, lymphomas, chronic renal disease, and enlarged spleens. The polynucleotides, polypeptides, antibodies, and/or agonists or antagonists of the present invention may be useful in treating, preventing, and/or diagnosing anemias arising from drug treatments such as anemias associated with methyldopa, dapsone, and/or sulfadrugs. Additionally, rhe polynucleotides, polypeptides, antibodies, and/or agonists or antagonists of the present invention may be useful in treating, preventing, and/or diagnosing anemias associated with abnormal red blood cell architecture including but not limited to, hereditary spherocytosis, hereditary elliptocytosis, glucose-6-phosphate dehydrogenase deficiency, and sickle cell anemia.

[0565] The polynucleotides, polypeptides, antibodies, and/or agonists or antagonists of the present invention may be useful in treating, preventing, and/or diagnosing hemoglobin abnormalities, (e.g., those associated with sickle cell anemia, hemoglobin C disease, hemoglobin S-C disease, and hemoglobin E disease). Additionally, the polynucleotides, polypeptides, antibodies, and/or agonists or antagonists of the present invention may be useful in diagnosing, prognosing, preventing, and/or treating thalassemias, including, but not limited to major and minor forms of alpha-thalassemia and beta-thalassemia.

[0566] In another embodiment, the polynucleotides, polypeptides, antibodies, and/or agonists or antagonists of the present invention may be useful in diagnosing, prognosing, preventing, and/or treating bleeding disorders including, but not limited to, thrombocytopenia (e.g., idiopathic thrombocytopenic purpura, and thrombotic thrombocytopenic purpura), Von Willebrand's disease, hereditary platelet disorders (e.g., storage pool disease such as Chediak-Higashi and Hermansky-Pudlak syndromes, thromboxane A2 dysfunction, thromboasthenia, and Bernard-Soulier syndrome), hemolytic-uremic syndrome, hemophelias such as hemophelia A or Factor VII deficiency and Christmas disease or Factor IX deficiency, Hereditary Hemorhhagic Telangiectsia, also known as Rendu-Osler-Weber syndrome, allergic purpura (Henoch Schonlein purpura) and disseminated intravascular coagulation.

[0567] The effect of the polynucleotides, polypeptides, antibodies, and/or agonists or antagonists of the present invention on the clotting time of blood may be monitored using any of the clotting tests known in the art including, but not limited to, whole blood partial thromboplastin time (PTT), the activated partial thromboplastin time (aPTT), the activated clotting time (ACT), the recalcified activated clotting time, or the Lee-White Clotting time.

[0568] Several diseases and a variety of drugs can cause platelet dysfunction. Thus, in a specific embodiment, the polynucleotides, polypeptides, antibodies, and/or agonists or antagonists of the present invention may be useful in diagnosing, prognosing, preventing, and/or treating acquired platelet dysfunction such as platelet dysfunction accompanying kidney failure, leukemia, multiple myeloma, cirrhosis of the liver, and systemic lupus erythematosus as well as platelet dysfunction associated with drug treatments, including treatment with aspirin, ticlopidine, nonsteroidal anti-inflammatory drugs (used for arthritis, pain, and sprains), and penicillin in high doses.

[0569] In another embodiment, the polynucleotides, polypeptides, antibodies, and/or agonists or antagonists of the present invention may be useful in diagnosing, prognosing, preventing, and/or treating diseases and disorders characterized by or associated with increased or decreased numbers of white blood cells. Leukopenia occurs when the number of white blood cells decreases below normal. Leukopenias include, but are not limited to, neutropenia and lymphocytopenia. An increase in the number of white blood cells compared to normal is known as leukocytosis. The body generates increased numbers of white blood cells during infection. Thus, leukocytosis may simply be a normal physiological parameter that reflects infection. Alternatively, leukocytosis may be an indicator of injury or other disease such as cancer. Leokocytoses, include but are not limited to, eosinophilia, and accumulations of macrophages. In specific embodiments, the polynucleotides, polypeptides, antibodies, and/or agonists or antagonists of the present invention may be useful in diagnosing, prognosing, preventing, and/or treating leukopenia. In other specific embodiments, the polynucleotides, polypeptides, antibodies, and/or agonists or antagonists of the present invention may be useful in diagnosing, prognosing, preventing, and/or treating leukocytosis.

[0570] Leukopenia may be a generalized decreased in all types of white blood cells, or may be a specific depletion of particular types of white blood cells. Thus, in specific embodiments, the polynucleotides, polypeptides, antibodies, and/or agonists or antagonists of the present invention may be useful in diagnosing, prognosing, preventing, and/or treating decreases in neutrophil numbers, known as neutropenia. Neutropenias that may be diagnosed, prognosed, prevented, and/or treated by the polynucleotides, polypeptides, antibodies, and/or agonists or antagonists of the present invention include, but are not limited to, infantile genetic agranulocytosis, familial neutropenia, cyclic neutropenia, neutropenias resulting from or associated with dietary deficiencies (e.g., vitamin B 12 deficiency or folic acid deficiency), neutropenias resulting from or associated with drug treatments (e.g., antibiotic regimens such as penicillin treatment, sulfonamide treatment, anticoagulant treatment, anticonvulsant drugs, anti-thyroid drugs, and cancer chemotherapy), and neutropenias resulting from increased neutrophil destruction that may occur in association with some bacterial or viral infections, allergic disorders, autoimmune diseases, conditions in which an individual has an enlarged spleen (e.g., Felty syndrome, malaria and sarcoidosis), and some drug treatment regimens.

[0571] The polynucleotides, polypeptides, antibodies, and/or agonists or antagonists of the present invention may be useful in diagnosing, prognosing, preventing, and/or treating lymphocytopenias (decreased numbers of B and/or T lymphocytes), including, but not limited lymphocytopenias resulting from or associated with stress, drug treatments (e.g., drug treatment with corticosteroids, cancer chemotherapies, and/or radiation therapies), AIDS infection and/or other diseases such as, for example, cancer, rheumatoid arthritis, systemic lupus erythematosus, chronic infections, some viral infections and/or hereditary disorders (e.g., DiGeorge syndrome, Wiskott-Aldrich Syndome, severe combined immunodeficiency, ataxia telangiectsia).

[0572] The polynucleotides, polypeptides, antibodies, and/or agonists or antagonists of the present invention may be useful in diagnosing, prognosing, preventing, and/or treating diseases and disorders associated with macrophage numbers and/or macrophage function including, but not limited to, Gaucher's disease, Niemann-Pick disease, Letterer-Siwe disease and Hand-Schuller-Christian disease.

[0573] In another embodiment, the polynucleotides, polypeptides, antibodies, and/or agonists or antagonists of the present invention may be useful in diagnosing, prognosing, preventing, and/or treating diseases and disorders associated with eosinophil numbers and/or eosinophil function including, but not limited to, idiopathic hypereosinophilic syndrome, eosinophilia-myalgia syndrome, and Hand-Schuller-Christian disease.

[0574] In yet another embodiment, the polynucleotides, polypeptides, antibodies, and/or agonists or antagonists of the present invention may be useful in diagnosing, prognosing, preventing, and/or treating leukemias and lymphomas including, but not limited to, acute lymphocytic (lymphpblastic) leukemia (ALL), acute myeloid (myelocytic, myclogenous, myeloblastic, or myelomonocytic) leukemia, chronic lymphocytic leukemia (e.g., B cell leukemias, T cell leukemias, Sezary syndrome, and Hairy cell leukenia), chronic myelocytic (myeloid, myelogenous, or granulocytic) leukemia, Hodgkin's lymphoma, non-hodgkin's lymphoma, Burkitt's lymphoma, and mycosis fungoides.

[0575] In other embodiments, the polynucleotides, polypeptides, antibodies, and/or agonists or antagonists of the present invention may be useful in diagnosing, prognosing, preventing, and/or treating diseases and disorders of plasma cells including, but not limited to, plasma cell dyscrasias, monoclonal gammaopathies, monoclonal gammopathies of undetermined significance, multiple myeloma, macroglobulinemia, Waldenstrom's macroglobulinemia, cryoglobulinemia, and Raynaud's phenomenon.

[0576] In other embodiments, the polynucleotides, polypeptides, antibodies, and/or agonists or antagonists of the present invention may be useful in treating, preventing, and/or diagnosing myeloproliferative disorders, including but not limited to, polycythemia vera, relative polycythemia, secondary polycythemia, myelofibrosis, acute myelofibrosis, agnogenic myelod metaplasia, thrombocythemia, (including both primary and seconday thrombocythemia) and chronic myelocytic leukemia.

[0577] In other embodiments, the polynucleotides, polypeptides, antibodies, and/or agonists or antagonists of the present invention may be useful as a treatment prior to surgery, to increase blood cell production.

[0578] In other embodiments, the polynucleotides, polypeptides, antibodies, and/or agonists or antagonists of the present invention may be useful as an agent to enhance the migration, phagocytosis, superoxide production, antibody dependent cellular cytotoxicity of neutrophils, eosionophils and macrophages.

[0579] In other embodiments, the polynucleotides, polypeptides, antibodies, and/or agonists or antagonists of the present invention may be useful as an agent to increase the number of stem cells in circulation prior to stem cells pheresis. In another specific embodiment, the polynucleotides, polypeptides, antibodies, and/or agonists or antagonists of the present invention may be useful as an agent to increase the number of stem cells in circulation prior to platelet pheresis.

[0580] In other embodiments, the polynucleotides, polypeptides, antibodies, and/or agonists or antagonists of the present invention may be useful as an agent to increase cytokine production.

[0581] In other embodiments, the polynucleotides, polypeptides, antibodies, and/or agonists or antagonists of the present invention may be useful in preventing, diagnosing, and/or treating primary hematopoietic disorders.

### Renal Disorders

[0582] Polynucleotides, polypeptides, antibodies, and/or agonists or antagonists of the present invention, may be used to treat, prevent, diagnose, and/or prognose disorders of the renal system. Renal disorders which can be diagnosed, prognosed, prevented, and/or treated with compositions of the invention include, but are not limited to, kidney failure, nephritis, blood vessel disorders of kidney, metabolic and congenital kidney disorders, urinary disorders of the kidney, autoimmune disorders, sclerosis and necrosis, electrolyte imbalance, and kidney cancers.

[0583] Kidney diseases which can be diagnosed, prognosed, prevented, and/or treated with compositions of the invention include, but are not limited to, acute kidney failure, chronic kidney failure, atheroembolic renal failure, end-stage renal disease, inflammatory diseases of the kidney (e.g., acute glomerulonephritis, postinfectious glomerulonephritis, rapidly progressive glomerulonephritis, nephrotic syndrome, membranous glomerulonephritis, familial nephrotic syndrome, membranoproliferative glomerulonephritis I and II, mesangial proliferative glomerulonephritis, chronic glomerulonephritis, acute tubulointerstitial nephritis, chronic tubulointerstitial nephritis, acute post-streptococcal glomerulonephritis (PSGN), pyelonephritis, lupus nephritis, chronic nephritis, interstitial nephritis, and post-streptococcal glomerulonephritis), blood vessel disorders of the kidneys (e.g., kidney infarction, atheroembolic kidney disease, cortical necrosis, malignant nephrosclerosis, renal vein thrombosis, renal underperfusion, renal retinopathy, renal ischemia-reperfusion, renal artery embolism, and renal artery stenosis), and kidney disorders resulting form urinary tract disease (e.g., pyelonephritis, hydronephrosis, urolithiasis (renal lithiasis, nephrolithiasis), reflux nephropathy, urinary tract infections, urinary retention, and acute or chronic unilateral obstructive uropathy.)

[0584] In addition, compositions of the invention can be used to diagnose, prognose, prevent, and/or treat metabolic and congenital disorders of the kidney (e.g., uremia, renal amyloidosis, renal osteodystrophy, renal tubular acidosis, renal glycosuria, nephrogenic diabetes insipidus, cystinuria, Fanconi's syndrome, renal fibrocystic osteosis (renal rickets), Hartnup disease, Bartter's syndrome, Liddle's syndrome, polycystic kidney disease, medullary cystic disease, medullary sponge kidney, Alport's syndrome, nail-patella syndrome, congenital nephrotic syndrome, CRUSH syndrome, horseshoe kidney, diabetic nephropathy, nephrogenic diabetes insipidus, analgesic nephropathy, kidney stones, and membranous nephropathy), and autoimmune disorders of the kidney (e.g., systemic lupus erythematosus (SLE), Goodpasture syndrome, IgA nephropathy, and IgM mesangial proliferative glomerulonephritis).

[0585] Compositions of the invention can also be used to diagnose, prognose, prevent, and/or treat sclerotic or necrotic disorders of the kidney (e.g., glomerulosclerosis, diabetic nephropathy, focal segmental glomerulosclerosis (FSGS), necrotizing glomerulonephritis, and renal papillary necrosis), cancers of the kidney (e.g., nephroma, hypernephroma, nephroblastoma, renal cell cancer, transitional cell cancer, renal adenocarcinoma, squamous cell cancer, and Wilm's tumor), and electrolyte imbalances (e.g., nephrocalcinosis, pyuria, edema, hydronephritis, proteinuria, hyponatremia, hypernatremia, hypokalemia, hyperkalemia, hypocalcemia, hypercalcemia, hypophosphatemia, and hyperphosphatemia).

[0586] Polypeptides may be administered using any method known in the art, including, but not limited to, direct needle injection at the delivery site, intravenous injection, topical administration, catheter infusion, biolistic injectors, particle accelerators, gelfoam sponge depots, other commercially available depot materials, osmotic pumps, oral or suppositorial solid pharmaceutical formulations, decanting or topical applications during surgery, aerosol delivery. Such methods are known in the art. Polypeptides may be administered as part of a Therapeutic, described in more detail below. Methods of delivering polynucleotides are described in more detail herein.

### Cardiovascular Disorders

[0587] Polynucleotides or polypeptides, or agonists or antagonists of the present invention, may be used to treat, prevent, diagnose, and/or prognose cardiovascular disorders, including, but not limited to, peripheral artery disease, such as limb ischemia.

[0588] Cardiovascular disorders include, but are not limited to, cardiovascular abnormalities, such as arterio-arterial fistula, arteriovenous fistula, cerebral arteriovenous malformations, congenital heart defects, pulmonary atresia, and Scimitar Syndrome. Congenital heart defects include, but are not limited to, aortic coarctation, cor triatriatum, coronary vessel anomalies, crisscross heart, dextrocardia, patent ductus arteriosus, Ebstein's anomaly, Eisenmenger complex, hypoplastic left heart syndrome, levocardia, tetralogy of fallot, transposition of great vessels, double outlet right ventricle, tricuspid atresia, persistent truncus arteriosus, and heart septal defects, such as aortopulmonary septal defect, endocardial cushion defects, Lutembacher's Syndrome, trilogy of Fallot, ventricular heart septal defects.

[0589] Cardiovascular disorders also include, but are not limited to, heart disease, such as arrhythmias, carcinoid heart disease, high cardiac output, low cardiac output, cardiac tamponade, endocarditis (including bacterial), heart aneurysm, cardiac arrest, congestive heart failure, congestive cardiomyopathy, paroxysmal dyspnea, cardiac edema, heart hypertrophy, congestive cardiomyopathy, left ventricular hypertrophy, right ventricular hypertrophy, post-infarction heart rupture, ventricular septal rupture, heart valve diseases, myocardial diseases, myocardial ischemia, pericardial effusion, pericarditis (including constrictive and tuberculous), pneumopericardium, postpericardiotomy syndrome, pulmonary heart disease, rheumatic heart disease, ventricular dysfunction, hyperemia, cardiovascular pregnancy complications, Scimitar Syndrome, cardiovascular syphilis, and cardiovascular tuberculosis.

[0590] Arrhythmias include, but are not limited to, sinus arrhythmia, atrial fibrillation, atrial flutter, bradycardia, extrasystole, Adams-Stokes Syndrome, bundle-branch block, sinoatrial block, long QT syndrome, parasystole, Lown-Ganong-Levine Syndrome, Mahaim-type pre-excitation syndrome, Wolff-Parkinson-White syndrome, sick sinus syndrome, tachycardias, and ventricular fibrillation. Tachycardias include paroxysmal tachycardia, supraventricular tachycardia, accelerated idioventricular rhythm, atrioventricular nodal reentry tachycardia, ectopic atrial tachycardia, ectopic junctional tachycardia, sinoatrial nodal reentry tachycardia, sinus tachycardia, Torsades de Pointes, and ventricular tachycardia.

[0591] Heart valve diseases include, but are not limited to, aortic valve insufficiency, aortic valve stenosis, hear murmurs, aortic valve prolapse, mitral valve prolapse, tricuspid valve prolapse, mitral valve insufficiency, mitral valve stenosis, pulmonary atresia, pulmonary valve insufficiency, pulmonary valve stenosis, tricuspid atresia, tricuspid valve insufficiency, and tricuspid valve stenosis.

[0592] Myocardial diseases include, but are not limited to, alcoholic cardiomyopathy, congestive cardiomyopathy, hypertrophic cardiomyopathy, aortic subvalvular stenosis, pulmonary subvalvular stenosis, restrictive cardiomyopathy, Chagas cardiomyopathy, endocardial fibroelastosis, endomyocardial fibrosis, Kearns Syndrome, myocardial reperfusion injury, and myocarditis.

[0593] Myocardial ischemias include, but are not limited to, coronary disease, such as angina pectoris, coronary aneurysm, coronary arteriosclerosis, coronary thrombosis, coronary vasospasm, myocardial infarction and myocardial stunning.

[0594] Cardiovascular diseases also include vascular diseases such as aneurysms, angiodysplasia, angiomatosis, bacillary angiomatosis, Hippel-Lindau Disease, Klippel-Trenaunay-Weber Syndrome, Sturge-Weber Syndrome, angioneurotic edema, aortic diseases, Takayasu's Arteritis, aortitis, Leriche's Syndrome, arterial occlusive diseases, arteritis, enarteritis, polyarteritis nodosa, cerebrovascular disorders, diabetic angiopathies, diabetic retinopathy, embolisms, thrombosis, erythromelalgia, hemorrhoids, hepatic veno-occlusive disease, hypertension, hypotension, ischemia, peripheral vascular diseases, phlebitis, pulmonary veno-occlusive disease, Raynaud's disease, CREST syndrome, retinal vein occlusion, Scimitar syndrome, superior vena cava syndrome, telangiectasia, atacia telangiectasia, hereditary hemorrhagic telangiectasia, varicocele, varicose veins, varicose ulcer, vasculitis, and venous insufficiency.

[0595] Aneurysms include, but are not limited to, dissecting aneurysms, false aneurysms, infected aneurysms, ruptured aneurysms, aortic aneurysms, cerebral aneurysms, coronary aneurysms, heart aneurysms, and iliac aneurysms.

[0596] Arterial occlusive diseases include, but are not limited to, arteriosclerosis, intermittent claudication, carotid stenosis, fibromuscular dysplasias, mesenteric vascular occlusion, Moyamoya disease, renal artery obstruction, retinal artery occlusion, and thromboangiitis obliterans.

[0597] Cerebrovascular disorders include, but are not limited to, carotid artery diseases, cerebral amyloid angiopathy, cerebral aneurysm, cerebral anoxia, cerebral arteriosclerosis, cerebral arteriovenous malformation, cerebral artery diseases, cerebral embolism and thrombosis, carotid artery thrombosis, sinus thrombosis, Wallenberg's syndrome, cerebral hemorrhage, epidural hematoma, subdural hematoma, subaraxhnoid hemorrhage, cerebral infarction, cerebral ischemia (including transient), subclavian steal syndrome, periventricular leukomalacia, vascular headache, cluster headache, migraine, and vertebrobasilar insufficiency.

[0598] Embolisms include, but are not limited to, air embolisms, amniotic fluid embolisms, cholesterol embolisms, blue toe syndrome, fat embolisms, pulmonary embolisms, and thromoboembolisms. Thrombosis include, but are not limited to, coronary thrombosis, hepatic vein thrombosis, retinal vein occlusion, carotid artery thrombosis, sinus thrombosis, Wallenberg's syndrome, and thrombophlebitis.

[0599] Ischemic disorders include, but are not limited to, cerebral ischemia, ischemic colitis, compartment syndromes, anterior compartment syndrome, myocardial ischemia, reperfusion injuries, and peripheral limb ischemia. Vasculitis includes, but is not limited to, aortitis, arteritis, Behcet's Syndrome, Churg-Strauss Syndrome, mucocutaneous lymph node syndrome, thromboangiitis obliterans, hypersensitivity vasculitis, Schoenlein-Henoch purpura, allergic cutaneous vasculitis, and Wegener's granulomatosis.

[0600] Polypeptides may be administered using any method known in the art, including, but not limited to, direct needle injection at the delivery site, intravenous injection, topical administration, catheter infusion, biolistic injectors, particle accelerators, gelfoam sponge depots, other commercially available depot materials, osmotic pumps, oral or suppositorial solid pharmaceutical formulations, decanting or topical applications during surgery, aerosol delivery. Such methods are known in the art. Polypeptides may be administered as part of a Therapeutic, described in more detail below. Methods of delivering polynucleotides are described in more detail herein.

### Respiratory Disorders

[0601] Polynucleotides or polypeptides, or agonists or antagonists of the present invention may be used to treat, prevent, diagnose, and/or prognose diseases and/or disorders of the respiratory system.

[0602] Diseases and disorders of the respiratory system include, but are not limited to, nasal vestibulitis, nonallergic rhinitis (e.g., acute rhinitis, chronic rhinitis, atrophic rhinitis, vasomotor rhinitis), nasal polyps, and sinusitis, juvenile angiofibromas, cancer of the nose and juvenile papillomas, vocal cord polyps, nodules (singer's nodules), contact ulcers, vocal cord paralysis, laryngoceles, pharyngitis (e.g., viral and bacterial), tonsillitis, tonsillar cellulitis, parapharyngeal abscess, laryngitis, laryngoceles, and throat cancers (e.g., cancer of the nasopharynx, tonsil cancer, larynx cancer), lung cancer (e.g., squamous cell carcinoma, small cell (oat cell) carcinoma, large cell carcinoma, and adenocarcinoma), allergic disorders (eosinophilic pneumonia, hypersensitivity pneumonitis (e.g., extrinsic allergic alveolitis, allergic interstitial pneumonitis, organic dust pneumoconiosis, allergic bronchopulmonary aspergillosis, asthma, Wegener's granulomatosis (granulomatous vasculitis), Goodpasture's syndrome)), pneumonia (e.g., bacterial pneumonia (e.g., Streptococcus pneumoniae (pneumoncoccal pneumonia), Staphylococcus aureus (staphylococcal pneumonia), Gram-negative bacterial pneumonia (caused by, e.g., Klebsiella and Pseudomas spp.), Mycoplasma pneumoniae pneumonia, Hemophilus influenzae pneumonia, Legionella pneumophila (Legionnaires' disease), and Chlamydia psittaci (Psittacosis)), and viral pneumonia (e.g., influenza, chickenpox (varicella).

[0603] Additional diseases and disorders of the respiratory system include, but are not limited to bronchiolitis, polio (poliomyelitis), croup, respiratory syncytial viral infection, mumps, erythema infectiosum (fifth disease), roseola infantum, progressive rubella panencephalitis, german measles, and subacute sclerosing panencephalitis), fungal pneumonia (e.g., Histoplasmosis, Coccidioidomycosis, Blastomycosis, fungal infections in people with severely suppressed immune systems (e.g., cryptococcosis, caused by Cryptococcus neoformans; aspergillosis, caused by Aspergillus spp.; candidiasis, caused by Candida; and mucormycosis)), Pneumocystis carinii (pneumocystis pneumonia), atypical pneumonias (e.g., Mycoplasma and Chlamydia spp.), opportunistic infection pneumonia, nosocomial pneumonia, chemical pneumonitis, and aspiration pneumonia, pleural disorders (e.g., pleurisy, pleural effusion, and pneumothorax (e.g., simple spontaneous pneumothorax, complicated spontaneous pneumothorax, tension pneumothorax)), obstructive airway diseases (e.g., asthma, chronic obstructive pulmonary disease (COPD), emphysema, chronic or acute bronchitis), occupational lung diseases (e.g., silicosis, black lung (coal workers' pneumoconiosis), asbestosis, berylliosis, occupational asthsma, byssinosis, and benign pneumoconioses), Infiltrative Lung Disease (e.g., pulmonary fibrosis (e.g., fibrosing alveolitis, usual interstitial pneumonia), idiopathic pulmonary fibrosis, desquamative interstitial pneumonia, lymphoid interstitial pneumonia, histiocytosis X (e.g., Letterer-Siwe disease, Hand-Schüller-Christian disease, eosinophilic granuloma), idiopathic pulmonary hemosiderosis, sarcoidosis and pulmonary alveolar proteinosis), Acute respiratory distress syndrome (also called, e.g., adult respiratory distress syndrome), edema, pulmonary embolism, bronchitis (e.g., viral, bacterial), bronchiectasis, atelectasis, lung abscess (caused by, e.g., Staphylococcus aureus or Legionella pneumophila), and cystic fibrosis.

### Anti-Angiogenesis Activity

[0604] The naturally occurring balance between endogenous stimulators and inhibitors of angiogenesis is one in which inhibitory influences predominate. Rastinejad et al., Cell 56:345-355 (1989). In those rare instances in which neovascularization occurs under normal physiological conditions, such as wound healing, organ regeneration, embryonic development, and female reproductive processes, angiogenesis is stringently regulated and spatially and temporally delimited. Under conditions of pathological angiogenesis such as that characterizing solid tumor growth, these regulatory controls fail. Unregulated angiogenesis becomes pathologic and sustains progression of many neoplastic and non-neoplastic diseases. A number of serious diseases are dominated by abnormal neovascularization including solid tumor growth and metastases, arthritis, some types of eye disorders, and psoriasis. See, e.g., reviews by Moses et al., Biotech. 9:630-634 (1991); Folkman et al., N. Engl. J. Med., 333:1757-1763 (1995); Auerbach et al., J. Microvasc. Res. 29:401-411 (1985); Folkman, Advances in Cancer Research, eds. Klein and Weinhouse, Academic Press, New York, pp. 175-203 (1985); Patz, Am. J. Opthalmol. 94:715-743 (1982); and Folkman et al., Science 221:719-725 (1983). In a number of pathological conditions, the process of angiogenesis contributes to the disease state. For example, significant data have accumulated which suggest that the growth of solid tumors is dependent on angiogenesis. Folkman and Klagsbrun, Science 235:442-447 (1987).

[0605] The present invention provides for treatment of diseases or disorders associated with neovascularization by administration of the polynucleotides and/or polypeptides of the invention, as well as agonists or antagonists of the present invention. Malignant and metastatic conditions which can be treated with the polynucleotides and polypeptides, or agonists or antagonists of the invention include, but are not limited to, malignancies, solid tumors, and cancers described herein and otherwise known in the art (for a review of such disorders, see Fishman et al., Medicine, 2d Ed., J. B. Lippincott Co., Philadelphia (1985)).Thus, the present invention provides a method of treating an angiogenesis-related disease and/or disorder, comprising administering to an individual in need thereof a therapeutically effective amount of a polynucleotide, polypeptide, antagonist and/or agonist of the invention. For example, polynucleotides, polypeptides, antagonists and/or agonists may be utilized in a variety of additional methods in order to therapeutically treat a cancer or tumor. Cancers which may be treated with polynucleotides, polypeptides, antagonists and/or agonists include, but are not limited to solid tumors, including prostate, lung, breast, ovarian, stomach, pancreas, larynx, esophagus, testes, liver, parotid, biliary tract, colon, rectum, cervix, uterus, endometrium, kidney, bladder, thyroid cancer; primary tumors and metastases; melanomas; glioblastoma; Kaposi's sarcoma; leiomyosarcoma; non-small cell lung cancer; colorectal cancer; advanced malignancies; and blood born tumors such as leukemias. For example, polynucleotides, polypeptides, antagonists and/or agonists may be delivered topically, in order to treat cancers such as skin cancer, head and neck tumors, breast tumors, and Kaposi's sarcoma.

[0606] Within yet other aspects, polynucleotides, polypeptides, antagonists and/or agonists may be utilized to treat superficial forms of bladder cancer by, for example, intravesical administration. Polynucleotides, polypeptides, antagonists and/or agonists may be delivered directly into the tumor, or near the tumor site, via injection or a catheter. Of course, as the artisan of ordinary skill will appreciate, the appropriate mode of administration will vary according to the cancer to be treated. Other modes of delivery are discussed herein.

[0607] Polynucleotides, polypeptides, antagonists and/or agonists may be useful in treating other disorders, besides cancers, which involve angiogenesis. These disorders include, but are not limited to: benign tumors, for example hemangiomas, acoustic neuromas, neurofibromas, trachomas, and pyogenic granulomas; artheroscleric plaques; ocular angiogenic diseases, for example, diabetic retinopathy, retinopathy of prematurity, macular degeneration, corneal graft rejection, neovascular glaucoma, retrolental fibroplasia, rubeosis, retinoblastoma, uvietis and Pterygia (abnormal blood vessel growth) of the eye; rheumatoid arthritis; psoriasis; delayed wound healing; endometriosis; vasculogenesis; granulations; hypertrophic scars (keloids); nonunion fractures; scleroderma; trachoma; vascular adhesions; myocardial angiogenesis; coronary collaterals; cerebral collaterals; arteriovenous malformations; ischemic limb angiogenesis; Osler-Webber Syndrome; plaque neovascularization; telangiectasia; hemophiliac joints; angiofibroma; fibromuscular dysplasia; wound granulation; Crohn's disease; and atherosclerosis.

[0608] For example, within one aspect of the present invention methods are provided for treating hypertrophic scars and keloids, comprising the step of administering a polynucleotide, polypeptide, antagonist and/or agonist of the invention to a hypertrophic scar or keloid.

[0609] Within one embodiment of the present invention polynucleotides, polypeptides, antagonists and/or agonists of the invention are directly injected into a hypertrophic scar or keloid, in order to prevent the progression of these lesions. This therapy is of particular value in the prophylactic treatment of conditions which are known to result in the development of hypertrophic scars and keloids (e.g., burns), and is preferably initiated after the proliferative phase has had time to progress (approximately 14 days after the initial injury), but before hypertrophic scar or keloid development. As noted above, the present invention also provides methods for treating neovascular diseases of the eye, including for example, corneal neovascularization, neovascular glaucoma, proliferative diabetic retinopathy, retrolental fibroplasia and macular degeneration.

[0610] Moreover, Ocular disorders associated with neovascularization which can be treated with the polynucleotides and polypeptides of the present invention (including agonists and/or antagonists) include, but are not limited to: neovascular glaucoma, diabetic retinopathy, retinoblastoma, retrolental fibroplasia, uveitis, retinopathy of prematurity macular degeneration, comeal graft neovascularization, as well as other eye inflammatory diseases, ocular tumors and diseases associated with choroidal or iris neovascularization. See, e.g., reviews by Waltman et al., Am. J. Ophthal. 85:704-710 (1978) and Gartner et al, Surv. Ophthal. 22:291-312 (1978).

[0611] Thus, within one aspect of the present invention methods are provided for treating neovascular diseases of the eye such as corneal neovascularization (including corneal graft neovascularization), comprising the step of administering to a patient a therapeutically effective amount of a compound (as described above) to the cornea, such that the formation of blood vessels is inhibited. Briefly, the cornea is a tissue which normally lacks blood vessels. In certain pathological conditions however, capillaries may extend into the cornea from the pericorneal vascular plexus of the limbus. When the cornea becomes vascularized, it also becomes clouded, resulting in a decline in the patient's visual acuity. Visual loss may become complete if the cornea completely opacitates. A wide variety of disorders can result in corneal neovascularization, including for example, corneal infections (e.g., trachoma, herpes simplex keratitis, leishmaniasis and onchocerciasis), immunological processes (e.g., graft rejection and Stevens-Johnson's syndrome), alkali burns, trauma, inflammation (of any cause), toxic and nutritional deficiency states, and as a complication of wearing contact lenses.

[0612] Within particularly preferred embodiments of the invention, may be prepared for topical administration in saline (combined with any of the preservatives and antimicrobial agents commonly used in ocular preparations), and administered in eyedrop form. The solution or suspension may be prepared in its pure form and administered several times daily. Alternatively, anti-angiogenic compositions, prepared as described above, may also be administered directly to the cornea. Within preferred embodiments, the anti-angiogenic composition is prepared with a muco-adhesive polymer which binds to comea. Within further embodiments, the anti-angiogenic factors or anti-angiogenic compositions may be utilized as an adjunct to conventional steroid therapy. Topical therapy may also be useful prophylactically in corneal lesions which are known to have a high probability of inducing an angiogenic response (such as chemical burns). In these instances the treatment, likely in combination with steroids, may be instituted immediately to help prevent subsequent complications.

[0613] Within other embodiments, the compounds described above may be injected directly into the corneal stroma by an ophthalnologist under microscopic guidance. The preferred site of injection may vary with the morphology of the individual lesion, but the goal of the administration would be to place the composition at the advancing front of the vasculature (i.e., interspersed between the blood vessels and the normal cornea). In most cases this would involve perilimbic corneal injection to “protect” the cornea from the advancing blood vessels. This method may also be utilized shortly after a corneal insult in order to prophylactically prevent corneal neovascularization. In this situation the material could be injected in the perilimbic cornea interspersed between the comeal lesion and its undesired potential limbic blood supply. Such methods may also be utilized in a similar fashion to prevent capillary invasion of transplanted corneas. In a sustained-release form injections might only be required 2-3 times per year. A steroid could also be added to the injection solution to reduce inflammation resulting from the injection itself.

[0614] Within another aspect of the present invention, methods are provided for treating neovascular glaucoma, comprising the step of administering to a patient a therapeutically effective amount of a polynucleotide, polypeptide, antagonist and/or agonist to the eye, such that the formation of blood vessels is inhibited. In one embodiment, the compound may be administered topically to the eye in order to treat early forms of neovascular glaucoma. Within other embodiments, the compound may be implanted by injection into the region of the anterior chamber angle. Within other embodiments, the compound may also be placed in any location such that the compound is continuously released into the aqueous humor. Within another aspect of the present invention, methods are provided for treating proliferative diabetic retinopathy, comprising the step of administering to a patient a therapeutically effective amount of a polynucleotide, polypeptide, antagonist and/or agonist to the eyes, such that the formation of blood vessels is inhibited.

[0615] Within particularly preferred embodiments of the invention, proliferative diabetic retinopathy may be treated by injection into the aqueous humor or the vitreous, in order to increase the local concentration of the polynucleotide, polypeptide, antagonist and/or agonist in the retina. Preferably, this treatment should be initiated prior to the acquisition of severe disease requiring photocoagulation.

[0616] Within another aspect of the present invention, methods are provided for treating retrolental fibroplasia, comprising the step of administering to a patient a therapeutically effective amount of a polynucleotide, polypeptide, antagonist and/or agonist to the eye, such that the formation of blood vessels is inhibited. The compound may be administered topically, via intravitreous injection and/or via intraocular implants.

[0617] Additionally, disorders which can be treated with the polynucleotides, polypeptides, agonists and/or agonists include, but are not limited to, hemangioma, arthritis, psoriasis, angiofibroma, atherosclerotic plaques, delayed wound healing, granulations, hemophilic joints, hypertrophic scars, nonunion fractures, Osler-Weber syndrome, pyogenic granuloma, scleroderma, trachoma, and vascular adhesions.

[0618] Moreover, disorders and/or states, which can be treated, prevented, diagnosed, and/or prognosed with the the polynucleotides, polypeptides, agonists and/or agonists of the invention include, but are not limited to, solid tumors, blood born tumors such as leukemias, tumor metastasis, Kaposi's sarcoma, benign tumors, for example hemangiomas, acoustic neuromas, neurofibromas, trachomas, and pyogenic granulomas, rheumatoid arthritis, psoriasis, ocular angiogenic diseases, for example, diabetic retinopathy, retinopathy of prematurity, macular degeneration, corneal graft rejection, neovascular glaucoma, retrolental fibroplasia, rubeosis, retinoblastoma, and uvietis, delayed wound healing, endometriosis, vascluogenesis, granulations, hypertrophic scars (keloids), nonunion fractures, scleroderma, trachoma, vascular adhesions, myocardial angiogenesis, coronary collaterals, cerebral collaterals, arteriovenous malformations, ischemic limb angiogenesis, Osler-Webber Syndrome, plaque neovascularization, telangiectasia, hemophiliac joints, angiofibroma fibromuscular dysplasia, wound granulation, Crohn's disease, atherosclerosis, birth control agent by preventing vascularization required for embryo implantation controlling menstruation, diseases that have angiogenesis as a pathologic consequence such as cat scratch disease (Rochele minalia quintosa), ulcers (Helicobacter pylori), Bartonellosis and bacillary angiomatosis.

[0619] In one aspect of the birth control method, an amount of the compound sufficient to block embryo implantation is administered before or after intercourse and fertilization have occurred, thus providing an effective method of birth control, possibly a “morning after” method. Polynucleotides, polypeptides, agonists and/or agonists may also be used in controlling menstruation or administered as either a peritoneal lavage fluid or for peritoneal implantation in the treatment of endometriosis.

[0620] Polynucleotides, polypeptides, agonists and/or agonists of the present invention may be incorporated into surgical sutures in order to prevent stitch granulomas.

[0621] Polynucleotides, polypeptides, agonists and/or agonists may be utilized in a wide variety of surgical procedures. For example, within one aspect of the present invention a compositions (in the form of, for example, a spray or film) may be utilized to coat or spray an area prior to removal of a tumor, in order to isolate normal surrounding tissues from malignant tissue, and/or to prevent the spread of disease to surrounding tissues. Within other aspects of the present invention, compositions (e.g., in the form of a spray) may be delivered via endoscopic procedures in order to coat tumors, or inhibit angiogenesis in a desired locale. Within yet other aspects of the present invention, surgical meshes which have been coated with anti-angiogenic compositions of the present invention may be utilized in any procedure wherein a surgical mesh might be utilized. For example, within one embodiment of the invention a surgical mesh laden with an anti-angiogenic composition may be utilized during abdominal cancer resection surgery (e.g., subsequent to colon resection) in order to provide support to the structure, and to release an amount of the anti-angiogenic factor.

[0622] Within further aspects of the present invention, methods are provided for treating tumor excision sites, comprising administering a polynucleotide, polypeptide, agonist and/or agonist to the resection margins of a tumor subsequent to excision, such that the local recurrence of cancer and the formation of new blood vessels at the site is inhibited. Within one embodiment of the invention, the anti-angiogenic compound is administered directly to the tumor excision site (e.g., applied by swabbing, brushing or otherwise coating the resection margins of the tumor with the anti-angiogenic compound). Alternatively, the anti-angiogenic compounds may be incorporated into known surgical pastes prior to administration. Within particularly preferred embodiments of the invention, the anti-angiogenic compounds are applied after hepatic resections for malignancy, and after neurosurgical operations.

[0623] Within one aspect of the present invention, polynucleotides, polypeptides, agonists and/or agonists may be administered to the resection margin of a wide variety of tumors, including for example, breast, colon, brain and hepatic tumors. For example, within one embodiment of the invention, anti-angiogenic compounds may be administered to the site of a neurological tumor subsequent to excision, such that the formation of new blood vessels at the site are inhibited.

[0624] The polynucleotides, polypeptides, agonists and/or agonists of the present invention may also be administered along with other anti-angiogenic factors. Representative examples of other anti-angiogenic factors include: Anti-Invasive Factor, retinoic acid and derivatives thereof, paclitaxel, Suramin, Tissue Inhibitor of Metalloproteinase-1, Tissue Inhibitor of Metalloproteinase-2, Plasminogen Activator Inhibitor-1, Plasminogen Activator Inhibitor-2, and various forms of the lighter “d group” transition metals.

[0625] Lighter “d group” transition metals include, for example, vanadium, molybdenum, tungsten, titanium, niobium, and tantalum species. Such transition metal species may form transition metal complexes. Suitable complexes of the above-mentioned transition metal species include oxo transition metal complexes.

[0626] Representative examples of vanadium complexes include oxo vanadium complexes such as vanadate and vanadyl complexes. Suitable vanadate complexes include metavanadate and orthovanadate complexes such as, for example, ammonium metavanadate, sodium metavanadate, and sodium orthovanadate. Suitable vanadyl complexes include, for example, vanadyl acetylacetonate and vanadyl sulfate including vanadyl sulfate hydrates such as vanadyl sulfate mono- and trihydrates.

[0627] Representative examples of tungsten and molybdenum complexes also include oxo complexes. Suitable oxo tungsten complexes include tungstate and tungsten oxide complexes. Suitable tungstate complexes include ammonium tungstate, calcium tungstate, sodium tungstate dihydrate, and tungstic acid. Suitable tungsten oxides include tungsten (IV) oxide and tungsten (VI) oxide. Suitable oxo molybdenum complexes include molybdate, molybdenum oxide, and molybdenyl complexes. Suitable molybdate complexes include ammonium molybdate and its hydrates, sodium molybdate and its hydrates, and potassium molybdate and its hydrates. Suitable molybdenum oxides include molybdenum (VI) oxide, molybdenum (VI) oxide, and molybdic acid. Suitable molybdenyl complexes include, for example, molybdenyl acetylacetonate. Other suitable tungsten and molybdenum complexes include hydroxo derivatives derived from, for example, glycerol, tartaric acid, and sugars.

[0628] A wide variety of other anti-angiogenic factors may also be utilized within the context of the present invention. Representative examples include platelet factor 4; protamine sulphate; sulphated chitin derivatives (prepared from queen crab shells), (Murata et al., Cancer Res. 51:22-26, 1991); Sulphated Polysaccharide Peptidoglycan Complex (SPPG) (the function of this compound may be enhanced by the presence of steroids such as estrogen, and tamoxifen citrate); Staurosporine; modulators of matrix metabolism, including for example, proline analogs, cishydroxyproline, d,L-3,4-dehydroproline, Thiaproline, alpha,alpha-dipyridyl, aminopropionitrile fumarate; 4-propyl-5-(4-pyridinyl)-2(3H)-oxazolone; Methotrexate; Mitoxantrone; Heparin; Interferons; 2 Macroglobulin-serum; ChIMP-3 (Pavloff et al., J. Bio. Chem. 267:17321-17326, 1992); Chymostatin (Tomkinson et al., Biochem J. 286:475-480, 1992); Cyclodextrin Tetradecasulfate; Eponemycin; Camptothecin; Fumagillin (Ingber et al., Nature 348:555-557, 1990); Gold Sodium Thiomalate (“GST”; Matsubara and Ziff, J. Clin. Invest. 79:1440-1446, 1987); anticollagenase-serum; alpha2-antiplasmin (Holmes et al., J. Biol. Chem. 262(4):1659-1664, 1987); Bisantrene (National Cancer Institute); Lobenzarit disodium (N-(2)-carboxyphenyl-4-chloroanthronilic acid disodium or “CCA”; Takeuchi et al., Agents Actions 36:312-316, 1992); Thalidomide; Angostatic steroid; AGM-1470; carboxynaminolmidazole; and metalloproteinase inhibitors such as BB94.

### Diseases at the Cellular Level

[0629] Diseases associated with increased cell survival or the inhibition of apoptosis that could be treated, prevented, diagnosed, and/or prognosed using polynucleotides or polypeptides, as well as antagonists or agonists of the present invention, include cancers (such as follicular lymphomas, carcinomas with p53 mutations, and hormone-dependent tumors, including, but not limited to colon cancer, cardiac tumors, pancreatic cancer, melanoma, retinoblastoma, glioblastoma, lung cancer, intestinal cancer, testicular cancer, stomach cancer, neuroblastoma, myxoma, myoma, lymphoma, endothelioma, osteoblastoma, osteoclastoma, osteosarcoma, chondrosarcoma, adenoma, breast cancer, prostate cancer, Kaposi's sarcoma and ovarian cancer); autoimmune disorders (such as, multiple sclerosis, Sjogren's syndrome, Hashimoto's thyroiditis, biliary cirrhosis, Behcet's disease, Crohn's disease, polymyositis, systemic lupus erythematosus and immune-related glomerulonephritis and rheumatoid arthritis) and viral infections (such as herpes viruses, pox viruses and adenoviruses), inflammation, graft v. host disease, acute graft rejection, and chronic graft rejection.

[0630] In preferred embodiments, polynucleotides, polypeptides, and/or antagonists of the invention are used to inhibit growth, progression, and/or metasis of cancers, in particular those listed above.

[0631] Additional diseases or conditions associated with increased cell survival that could be treated or detected by polynucleotides or polypeptides, or agonists or antagonists of the present invention include, but are not limited to, progression, and/or metastases of malignancies and related disorders such as leukemia (including acute leukemias (e.g., acute lymphocytic leukemia, acute myelocytic leukemia (including myeloblastic, promyelocytic, myelomonocytic, monocytic, and erythroleukemia)) and chronic leukemias (e.g., chronic myelocytic (granulocytic) leukemia and chronic lymphocytic leukemia)), polycythemia vera, lymphomas (e.g., Hodgkin's disease and non-Hodgkin's disease), multiple myeloma, Waldenstrom's macroglobulinemia, heavy chain disease, and solid tumors including, but not limited to, sarcomas and carcinomas such as fibrosarcoma, myxosarcoma, liposarcoma, chondrosarcoma, osteogenic sarcoma, chordoma, angiosarcoma, endotheliosarcoma, lymphangiosarcoma, lymphangioendotheliosarcoma, synovioma, mesothelioma, Ewing's tumor, leiomyosarcoma, rhabdomyosarcoma, colon carcinoma, pancreatic cancer, breast cancer, ovarian cancer, prostate cancer, squamous cell carcinoma, basal cell carcinoma, adenocarcinoma, sweat gland carcinoma, sebaceous gland carcinoma, papillary carcinoma, papillary adenocarcinomas, cystadenocarcinoma, medullary carcinoma, bronchogenic carcinoma, renal cell carcinoma, hepatoma, bile duct carcinoma, choriocarcinoma, seminoma, embryonal carcinoma, Wilm's tumor, cervical cancer, testicular tumor, lung carcinoma, small cell lung carcinoma, bladder carcinoma, epithelial carcinoma, glioma, astrocytoma, medulloblastoma, craniopharyngioma, ependymoma, pinealoma, hemangioblastoma, acoustic neuroma, oligodendroglioma, menangioma, melanoma, neuroblastoma, and retinoblastoma.

[0632] Diseases associated with increased apoptosis that could be treated, prevented, diagnosed, and/or prognesed using polynucleotides or polypeptides, as well as agonists or antagonists of the present invention, include, but are not limited to, AIDS; neurodegenerative disorders (such as Alzheimer's disease, Parkinson's disease, Amyotrophic lateral sclerosis, Retinitis pigmentosa, Cerebellar degeneration and brain tumor or prior associated disease); autoimmune disorders (such as, multiple sclerosis, Sjogren's syndrome, Hashimoto's thyroiditis, biliary cirrhosis, Behcet's disease, Crohn's disease, polymyositis, systemic lupus erythematosus and immune-related glomerulonephritis and rheumatoid arthritis) myelodysplastic syndromes (such as aplastic anemia), graft v. host disease, ischemic injury (such as that caused by myocardial infarction, stroke and reperfusion injury), liver injury (e.g., hepatitis related liver injury, ischemia/reperfusion injury, cholestosis (bile duct injury) and liver cancer); toxin-induced liver disease (such as that caused by alcohol), septic shock, cachexia and anorexia.

### Wound Healing and Epithelial Cell Proliferation

[0633] In accordance with yet a further aspect of the present invention, there is provided a process for utilizing polynucleotides or polypeptides, as well as agonists or antagonists of the present invention, for therapeutic purposes, for example, to stimulate epithelial cell proliferation and basal keratinocytes for the purpose of wound healing, and to stimulate hair follicle production and healing of dermal wounds. Polynucleotides or polypeptides, as well as agonists or antagonists of the present invention, may be clinically useful in stimulating wound healing including surgical wounds, excisional wounds, deep wounds involving damage of the dermis and epidermis, eye tissue wounds, dental tissue wounds, oral cavity wounds, diabetic ulcers, dermal ulcers, cubitus ulcers, arterial ulcers, venous stasis ulcers, burns resulting from heat exposure or chemicals, and other abnormal wound healing conditions such as uremia, malnutrition, vitamin deficiencies and complications associated with systemic treatment with steroids, radiation therapy and antineoplastic drugs and antimetabolites. Polynucleotides or polypeptides, as well as agonists or antagonists of the present invention, could be used to promote dermal reestablishment subsequent to dermal loss

[0634] Polynucleotides or polypeptides, as well as agonists or antagonists of the present invention, could be used to increase the adherence of skin grafts to a wound bed and to stimulate re-epithelialization from the wound bed. The following are types of grafts that polynucleotides or polypeptides, agonists or antagonists of the present invention, could be used to increase adherence to a wound bed: autografts, artificial skin, allografts, autodermic graft, autoepdermic grafts, avacular grafts, Blair-Brown grafts, bone graft, brephoplastic grafts, cutis graft, delayed graft, dermic graft, epidermic graft, fascia graft, full thickness graft, heterologous graft, xenograft, homologous graft, hyperplastic graft, lamellar graft, mesh graft, mucosal graft, Ollier-Thiersch graft, omenpal graft, patch graft, pedicle graft, penetrating graft, split skin graft, thick split graft. Polynucleotides or polypeptides, as well as agonists or antagonists of the present invention, can be used to promote skin strength and to improve the appearance of aged skin.

[0635] It is believed that polynucleotides or polypeptides, as well as agonists or antagonists of the present invention, will also produce changes in hepatocyte proliferation, and epithelial cell proliferation in the lung, breast, pancreas, stomach, small intestine, and large intestine. Polynucleotides or polypeptides, as well as agonists or antagonists of the present invention, could promote proliferation of epithelial cells such as sebocytes, hair follicles, hepatocytes, type II pneumocytes, mucin-producing goblet cells, and other epithelial cells and their progenitors contained within the skin, lung, liver, and gastrointestinal tract. Polynucleotides or polypeptides, agonists or antagonists of the present invention, may promote proliferation of endothelial cells, keratinocytes, and basal keratinocytes.

[0636] Polynucleotides or polypeptides, as well as agonists or antagonists of the present invention, could also be used to reduce the side effects of gut toxicity that result from radiation, chemotherapy treatments or viral infections. Polynucleotides or polypeptides, as well as agonists or antagonists of the present invention, may have a cytoprotective effect on the small intestine mucosa. Polynucleotides or polypeptides, as well as agonists or antagonists of the present invention, may also stimulate healing of mucositis (mouth ulcers) that result from chemotherapy and viral infections.

[0637] Polynucleotides or polypeptides, as well as agonists or antagonists of the present invention, could further be used in full regeneration of skin in full and partial thickness skin defects, including bums, (i.e., repopulation of hair follicles, sweat glands, and sebaceous glands), treatment of other skin defects such as psoriasis. Polynucleotides or polypeptides, as well as agonists or antagonists of the present invention, could be used to treat epidermolysis bullosa, a defect in adherence of the epidermis to the underlying dermis which results in frequent, open and painful blisters by accelerating reepithelialization of these lesions. Polynucleotides or polypeptides, as well as agonists or antagonists of the present invention, could also be used to treat gastric and doudenal ulcers and help heal by scar formation of the mucosal lining and regeneration of glandular mucosa and duodenal mucosal lining more rapidly. Inflammatory bowel diseases, such as Crohn's disease and ulcerative colitis, are diseases which result in destruction of the mucosal surface of the small or large intestine, respectively. Thus, polynucleotides or polypeptides, as well as agonists or antagonists of the present invention, could be used to promote the resurfacing of the mucosal surface to aid more rapid healing and to prevent progression of inflammatory bowel disease. Treatment with polynucleotides or polypeptides, agonists or antagonists of the present invention, is expected to have a significant effect on the production of mucus throughout the gastrointestinal tract and could be used to protect the intestinal mucosa from injurious substances that are ingested or following surgery. Polynucleotides or polypeptides, as well as agonists or antagonists of the present invention, could be used to treat diseases associate with the under expression.

[0638] Moreover, polynucleotides or polypeptides, as well as agonists or antagonists of the present invention, could be used to prevent and heal damage to the lungs due to various pathological states. Polynucleotides or polypeptides, as well as agonists or antagonists of the present invention, which could stimulate proliferation and differentiation and promote the repair of alveoli and brochiolar epithelium to prevent or treat acute or chronic lung damage. For example, emphysema, which results in the progressive loss of aveoli, and inhalation injuries, i.e., resulting from smoke inhalation and burns, that cause necrosis of the bronchiolar epithelium and alveoli could be effectively treated using polynucleotides or polypeptides, agonists or antagonists of the present invention. Also, polynucleotides or polypeptides, as well as agonists or antagonists of the present invention, could be used to stimulate the proliferation of and differentiation of type II pneumocytes, which may help treat or prevent disease such as hyaline membrane diseases, such as infant respiratory distress syndrome and bronchopulmonary displasia, in premature infants.

[0639] Polynucleotides or polypeptides, as well as agonists or antagonists of the present invention, could stimulate the proliferation and differentiation of hepatocytes and, thus, could be used to alleviate or treat liver diseases and pathologies such as fulminant liver failure caused by cirrhosis, liver damage caused by viral hepatitis and toxic substances (i.e., acetaminophen, carbon tetraholoride and other hepatotoxins known in the art).

[0640] In addition, polynucleotides or polypeptides, as well as agonists or antagonists of the present invention, could be used treat or prevent the onset of diabetes mellitus. In patients with newly diagnosed Types I and II diabetes, where some islet cell function remains, polynucleotides or polypeptides, as well as agonists or antagonists of the present invention, could be used to maintain the islet function so as to alleviate, delay or prevent permanent manifestation of the disease. Also, polynucleotides or polypeptides, as well as agonists or antagonists of the present invention, could be used as an auxiliary in islet cell transplantation to improve or promote islet cell function.

### Neural Activity and Neurological Diseases

[0641] The polynucleotides, polypeptides and agonists or antagonists of the invention may be used for the diagnosis and/or treatment of diseases, disorders, damage or injury of the brain and/or nervous system. Nervous system disorders that can be treated with the compositions of the invention (e.g., polypeptides, polynucleotides, and/or agonists or antagonists), include, but are not limited to, nervous system injuries, and diseases or disorders which result in either a disconnection of axons, a diminution or degeneration of neurons, or demyelination. Nervous system lesions which may be treated in a patient (including human and non-human mammalian patients) according to the methods of the invention, include but are not limited to, the following lesions of either the central (including spinal cord, brain) or peripheral nervous systems: (1) ischemic lesions, in which a lack of oxygen in a portion of the nervous system results in neuronal injury or death, including cerebral infarction or ischemia, or spinal cord infarction or ischemia; (2) traumatic lesions, including lesions caused by physical injury or associated with surgery, for example, lesions which sever a portion of the nervous system, or compression injuries; (3) malignant lesions, in which a portion of the nervous system is destroyed or injured by malignant tissue which is either a nervous system associated malignancy or a malignancy derived from non-nervous system tissue; (4) infectious lesions, in which a portion of the nervous system is destroyed or injured as a result of infection, for example, by an abscess or associated with infection by human immunodeficiency virus, herpes zoster, or herpes simplex virus or with Lyme disease, tuberculosis, or syphilis; (5) degenerative lesions, in which a portion of the nervous system is destroyed or injured as a result of a degenerative process including but not limited to, degeneration associated with Parkinson's disease, Alzheimer's disease, Huntington's chorea, or amyotrophic lateral sclerosis (ALS); (6) lesions associated with nutritional diseases or disorders, in which a portion of the nervous system is destroyed or injured by a nutritional disorder or disorder of metabolism including, but not limited to, vitamin B12 deficiency, folic acid deficiency, Wernicke disease, tobacco-alcohol amblyopia, Marchiafava-Bignami disease (primary degeneration of the corpus callosum), and alcoholic cerebellar degeneration; (7) neurological lesions associated with systemic diseases including, but not limited to, diabetes (diabetic neuropathy, Bell's palsy), systemic lupus erythematosus, carcinoma, or sarcoidosis; (8) lesions caused by toxic substances including alcohol, lead, or particular neurotoxins; and (9) demyelinated lesions in which a portion of the nervous system is destroyed or injured by a demyelinating disease including, but not limited to, multiple sclerosis, human immunodeficiency virus-associated myelopathy, transverse myelopathy or various etiologies, progressive multifocal leukoencephalopathy, and central pontine myelinolysis.

[0642] In one embodiment, the polypeptides, polynucleotides, or agonists or antagonists of the invention are used to protect neural cells from the damaging effects of hypoxia. In a further preferred embodiment, the polypeptides, polynucleotides, or agonists or antagonists of the invention are used to protect neural cells from the damaging effects of cerebral hypoxia. According to this embodiment, the compositions of the invention are used to treat or prevent neural cell injury associated with cerebral hypoxia. In one non-exclusive aspect of this embodiment, the polypeptides, polynucleotides, or agonists or antagonists of the invention, are used to treat or prevent neural cell injury associated with cerebral ischemia. In another non-exclusive aspect of this embodiment, the polypeptides, polynucleotides, or agonists or antagonists of the invention are used to treat or prevent neural cell injury associated with cerebral infarction.

[0643] In another preferred embodiment, the polypeptides, polynucleotides, or agonists or antagonists of the invention are used to treat or prevent neural cell injury associated with a stroke. In a specific embodiment, the polypeptides, polynucleotides, or agonists or antagonists of the invention are used to treat or prevent cerebral neural cell injury associated with a stroke.

[0644] In another preferred embodiment, the polypeptides, polynucleotides, or agonists or antagonists of the invention are used to treat or prevent neural cell injury associated with a heart attack. In a specific embodiment, the polypeptides, polynucleotides, or agonists or antagonists of the invention are used to treat or prevent cerebral neural cell injury associated with a heart attack.

[0645] The compositions of the invention which are useful for treating or preventing a nervous system disorder may be selected by testing for biological activity in promoting the survival or differentiation of neurons. For example, and not by way of limitation, compositions of the invention which elicit any of the following effects may be useful according to the invention: (1) increased survival time of neurons in culture either in the presence or absence of hypoxia or hypoxic conditions; (2) increased sprouting of neurons in culture or in vivo; (3) increased production of a neuron-associated molecule in culture or in vivo, e.g., choline acetyltransferase or acetylcholinesterase with respect to motor neurons; or (4) decreased symptoms of neuron dysfunction in vivo. Such effects may be measured by any method known in the art. In preferred, non-limiting embodiments, increased survival of neurons may routinely be measured using a method set forth herein or otherwise known in the art, such as, for example, in Zhang et al., Proc Natl Acad Sci USA 97:3637-42 (2000) or in Arakawa et al., J. Neurosci., 10:3507-15 (1990); increased sprouting of neurons may be detected by methods known in the art, such as, for example, the methods set forth in Pestronk et al., Exp. Neurol., 70:65-82 (1980), or Brown et al., Ann. Rev. Neurosci., 4:17-42 (1981); increased production of neuron-associated molecules may be measured by bioassay, enzymatic assay, antibody binding, Northern blot assay, etc., using techniques known in the art and depending on the molecule to be measured; and motor neuron dysfunction may be measured by assessing the physical manifestation of motor neuron disorder, e.g., weakness, motor neuron conduction velocity, or functional disability.

[0646] In specific embodiments, motor neuron disorders that may be treated according to the invention include, but are not limited to, disorders such as infarction, infection, exposure to toxin, trauma, surgical damage, degenerative disease or malignancy that may affect motor neurons as well as other components of the nervous system, as well as disorders that selectively affect neurons such as amyotrophic lateral sclerosis, and including, but not limited to, progressive spinal muscular atrophy, progressive bulbar palsy, primary lateral sclerosis, infantile and juvenile muscular atrophy, progressive bulbar paralysis of childhood (Fazio-Londe syndrome), poliomyelitis and the post polio syndrome, and Hereditary Motorsensory Neuropathy (Charcot-Marie-Tooth Disease).

[0647] Further, polypeptides or polynucleotides of the invention may play a role in neuronal survival; synapse formation; conductance; neural differentiation, etc. Thus, compositions of the invention (including polynucleotides, polypeptides, and agonists or antagonists) may be used to diagnose and/or treat or prevent diseases or disorders associated with these roles, including, but not limited to, learning and/or cognition disorders. The compositions of the invention may also be useful in the treatment or prevention of neurodegenerative disease states and/or behavioural disorders. Such neurodegenerative disease states and/or behavioral disorders include, but are not limited to, Alzheimer's Disease, Parkinson's Disease, Huntington's Disease, Tourette Syndrome, schizophrenia, mania, dementia, paranoia, obsessive compulsive disorder, panic disorder, learning disabilities, ALS, psychoses, autism, and altered behaviors, including disorders in feeding, sleep patterns, balance, and perception. In addition, compositions of the invention may also play a role in the treatment, prevention and/or detection of developmental disorders associated with the developing embryo, or sexually-linked disorders.

[0648] Additionally, polypeptides, polynucleotides and/or agonists or antagonists of the invention, may be useful in protecting neural cells from diseases, damage, disorders, or injury, associated with cerebrovascular disorders including, but not limited to, carotid artery diseases (e.g., carotid artery thrombosis, carotid stenosis, or Moyamoya Disease), cerebral amyloid angiopathy, cerebral aneurysm, cerebral anoxia, cerebral arteriosclerosis, cerebral arteriovenous malformations, cerebral artery diseases, cerebral embolism and thrombosis (e.g., carotid artery thrombosis, sinus thrombosis, or Wallenberg's Syndrome), cerebral hemorrhage (e.g., epidural or subdural hematoma, or subarachnoid hemorrhage), cerebral infarction, cerebral ischemia (e.g., transient cerebral ischemia, Subclavian Steal Syndrome, or vertebrobasilar insufficiency), vascular dementia (e.g., multi-infarct), leukomalacia, periventricular, and vascular headache (e.g., cluster headache or migraines).

[0649] In accordance with yet a further aspect of the present invention, there is provided a process for utilizing polynucleotides or polypeptides, as well as agonists or antagonists of the present invention, for therapeutic purposes, for example, to stimulate neurological cell proliferation and/or differentiation. Therefore, polynucleotides, polypeptides, agonists and/or antagonists of the invention may be used to treat and/or detect neurologic diseases. Moreover, polynucleotides or polypeptides, or agonists or antagonists of the invention, can be used as a marker or detector of a particular nervous system disease or disorder.

[0650] Examples of neurologic diseases which can be treated or detected with polynucleotides, polypeptides, agonists, and/or antagonists of the present invention include brain diseases, such as metabolic brain diseases which includes phenylketonuria such as maternal phenylketonuria, pyruvate carboxylase deficiency, pyruvate dehydrogenase complex deficiency, Wernicke's Encephalopathy, brain edema, brain neoplasms such as cerebellar neoplasms which include infratentorial neoplasms, cerebral ventricle neoplasms such as choroid plexus neoplasms, hypothalamic neoplasms, supratentorial neoplasms, canavan disease, cerebellar diseases such as cerebellar ataxia which include spinocerebellar degeneration such as ataxia telangiectasia, cerebellar dyssynergia, Friederich's Ataxia, Machado-Joseph Disease, olivopontocerebellar atrophy, cerebellar neoplasms such as infratentorial neoplasms, diffuse cerebral sclerosis such as encephalitis periaxialis, globoid cell leukodystrophy, metachromatic leukodystrophy and subacute sclerosing panencephalitis.

[0651] Additional neurologic diseases which can be treated or detected with polynucleotides, polypeptides, agonists, and/or antagonists of the present invention include cerebrovascular disorders (such as carotid artery diseases which include carotid artery thrombosis, carotid stenosis and Moyamoya Disease), cerebral amyloid angiopathy, cerebral aneurysm, cerebral anoxia, cerebral arteriosclerosis, cerebral arteriovenous malformations, cerebral artery diseases, cerebral embolism and thrombosis such as carotid artery thrombosis, sinus thrombosis and Wallenberg's Syndrome, cerebral hemorrhage such as epidural hematoma, subdural hematoma and subarachnoid hemorrhage, cerebral infarction, cerebral ischemia such as transient cerebral ischemia, Subclavian Steal Syndrome and vertebrobasilar insufficiency, vascular dementia such as multi-infarct dementia, periventricular leukomalacia, vascular headache such as cluster headache and migraine.

[0652] Additional neurologic diseases which can be treated or detected with polynucleotides, polypeptides, agonists, and/or antagonists of the present invention include dementia such as AIDS Dementia Complex, presenile dementia such as Alzheimer's Disease and Creutzfeldt-Jakob Syndrome, senile dementia such as Alzheimer's Disease and progressive supranuclear palsy, vascular dementia such as multi-infarct dementia, encephalitis which include encephalitis periaxialis, viral encephalitis such as epidemic encephalitis, Japanese Encephalitis, St. Louis Encephalitis, tick-borne encephalitis and West Nile Fever, acute disseminated encephalomyelitis, meningoencephalitis such as uveomeningoencephalitic syndrome, Postencephalitic Parkinson Disease and subacute sclerosing panencephalitis, encephalomalacia such as periventricular leukomalacia, epilepsy such as generalized epilepsy which includes infantile spasms, absence epilepsy, myoclonic epilepsy which includes MERRF Syndrome, tonic-clonic epilepsy, partial epilepsy such as complex partial epilepsy, frontal lobe epilepsy and temporal lobe epilepsy, post-traumatic epilepsy, status epilepticus such as Epilepsia Partialis Continua, and Hallervorden-Spatz Syndrome.

[0653] Additional neurologic diseases which can be treated or detected with polynucleotides, polypeptides, agonists, and/or antagonists of the present invention include hydrocephalus such as Dandy-Walker Syndrome and normal pressure hydrocephalus, hypothalamic diseases such as hypothalamic neoplasms, cerebral malaria, narcolepsy which includes cataplexy, bulbar poliomyelitis, cerebri pseudotumor, Rett Syndrome, Reye's Syndrome, thalamic diseases, cerebral toxoplasmosis, intracranial tuberculoma and Zellweger Syndrome, central nervous system infections such as AIDS Dementia Complex, Brain Abscess, subdural empyema, encephalomyelitis such as Equine Encephalomyelitis, Venezuelan Equine Encephalomyelitis, Necrotizing Hemorrhagic Encephalomyelitis, Visna, and cerebral malaria.

[0654] Additional neurologic diseases which can be treated or detected with polynucleotides, polypeptides, agonists, and/or antagonists of the present invention include meningitis such as arachnoiditis, aseptic meningtitis such as viral meningtitis which includes lymphocytic choriomeningitis, Bacterial meningtitis which includes Haemophilus Meningtitis, Listeria Meningtitis, Meningococcal Meningtitis such as Waterhouse-Friderichsen Syndrome, Pneumococcal Meningtitis and meningeal tuberculosis, fungal meningitis such as Cryptococcal Meningtitis, subdural effusion, meningoencephalitis such as uvemeningoencephalitic syndrome, myelitis such as transverse myelitis, neurosyphilis such as tabes dorsalis, poliomyelitis which includes bulbar poliomyelitis and postpoliomyelitis syndrome, prion diseases (such as Creutzfeldt-Jakob Syndrome, Bovine Spongiform Encephalopathy, Gerstmann-Straussler Syndrome, Kuru, Scrapie), and cerebral toxoplasmosis.

[0655] Additional neurologic diseases which can be treated or detected with polynucleotides, polypeptides, agonists, and/or antagonists of the present invention include central nervous system neoplasms such as brain neoplasms that include cerebellar neoplasms such as infratentorial neoplasms, cerebral ventricle neoplasms such as choroid plexus neoplasms, hypothalamic neoplasms and supratentorial neoplasms, meningeal neoplasms, spinal cord neoplasms which include epidural neoplasms, demyelinating diseases such as Canavan Diseases, diffuse cerebral sceloris which includes adrenoleukodystrophy, encephalitis periaxialis, globoid cell leukodystrophy, diffuse cerebral sclerosis such as metachromatic leukodystrophy, allergic encephalomyelitis, necrotizing hemorrhagic encephalomyelitis, progressive multifocal leukoencephalopathy, multiple sclerosis, central pontine myelinolysis, transverse myelitis, neuromyelitis optica, Scrapie, Swayback, Chronic Fatigue Syndrome, Visna, High Pressure Nervous Syndrome, Meningism, spinal cord diseases such as amyotonia congenita, amyotrophic lateral sclerosis, spinal muscular atrophy such as Werdnig-Hoffmann Disease, spinal cord compression, spinal cord neoplasms such as epidural neoplasms, syringomyelia, Tabes Dorsalis, Stiff-Man Syndrome, mental retardation such as Angelman Syndrome, Cri-du-Chat Syndrome, De Lange's Syndrome, Down Syndrome, Gangliosidoses such as gangliosidoses G(M1), Sandhoff Disease, Tay-Sachs Disease, Hartnup Disease, homocystinuria, Laurence-Moon-Biedl Syndrome, Lesch-Nyhan Syndrome, Maple Syrup Urine Disease, mucolipidosis such as fucosidosis, neuronal ceroid-lipofuscinoisis, oculocerebrorenal syndrome, phenylketonuria such as maternal phenylketonuria, Prader-Willi Syndrome, Rett Syndrome, Rubinstein-Taybi Syndrome, Tuberous Sclerosis, WAGR Syndrome, nervous system abnormalities such as holoprosencephaly, neural tube defects such as anencephaly which includes hydrangencephaly, Arnold-Chairi Deformity, encephalocele, meningocele, meningomyelocele, spinal dysraphism such as spina bifida cystica and spina bifida occulta.

[0656] Additional neurologic diseases which can be treated or detected with polynucleotides, polypeptides, agonists, and/or antagonists of the present invention include hereditary motor and sensory neuropathies which include Charcot-Marie Disease, Hereditary optic atrophy, Refsum's Disease, hereditary spastic paraplegia, Werdnig-Hoffmann Disease, Hereditary Sensory and Autonomic Neuropathies such as Congenital Analgesia and Familial Dysautonomia, Neurologic manifestations (such as agnosia that include Gerstmann's Syndrome, Amnesia such as retrograde amnesia, apraxia, neurogenic bladder, cataplexy, communicative disorders such as hearing disorders that includes deafness, partial hearing loss, loudness recruitment and tinnitus, language disorders such as aphasia which include agraphia, anomia, broca aphasia, and Wernicke Aphasia, Dyslexia such as Acquired Dyslexia, language development disorders, speech disorders such as aphasia which includes anomia, broca aphasia and Wernicke Aphasia, articulation disorders, communicative disorders such as speech disorders which include dysarthria, echolalia, mutism and stuttering, voice disorders such as aphonia and hoarseness, decerebrate state, delirium, fasciculation, hallucinations, meningism, movement disorders such as angelman syndrome, ataxia, athetosis, chorea, dystonia, hypokinesia, muscle hypotonia, myoclonus, tic, torticollis and tremor, muscle hypertonia such as muscle rigidity such as stiff-man syndrome, muscle spasticity, paralysis such as facial paralysis which includes Herpes Zoster Oticus, Gastroparesis, Hemiplegia, ophthalmoplegia such as diplopia, Duane's Syndrome, Horner's Syndrome, Chronic progressive external ophthalmoplegia such as Kearns Syndrome, Bulbar Paralysis, Tropical Spastic Paraparesis, Paraplegia such as Brown-Sequard Syndrome, quadriplegia, respiratory paralysis and vocal cord paralysis, paresis, phantom limb, taste disorders such as ageusia and dysgeusia, vision disorders such as amblyopia, blindness, color vision defects, diplopia, hemianopsia, scotoma and subnormal vision, sleep disorders such as hypersomnia which includes Kleine-Levin Syndrome, insomnia, and somnambulism, spasm such as trismus, unconsciousness such as coma, persistent vegetative state and syncope and vertigo, neuromuscular diseases such as amyotonia congenita, amyotrophic lateral sclerosis, Lambert-Eaton Myasthenic Syndrome, motor neuron disease, muscular atrophy such as spinal muscular atrophy, Charcot-Marie Disease and Werdnig-Hoffmann Disease, Postpoliomyelitis Syndrome, Muscular Dystrophy, Myasthenia Gravis, Myotonia Atrophica, Myotonia Confenita, Nemaline Myopathy, Familial Periodic Paralysis, Multiplex Paramyloclonus, Tropical Spastic Paraparesis and Stiff-Man Syndrome, peripheral nervous system diseases such as acrodynia, amyloid neuropathies, autonomic nervous system diseases such as Adie's Syndrome, Barre-Lieou Syndrome, Familial Dysautonomia, Homer's Syndrome, Reflex Sympathetic Dystrophy and Shy-Drager Syndrome, Cranial Nerve Diseases such as Acoustic Nerve Diseases such as Acoustic Neuroma which includes Neurofibromatosis 2, Facial Nerve Diseases such as Facial Neuralgia,Melkersson-Rosenthal Syndrome, ocular motility disorders which includes amblyopia, nystagmus, oculomotor nerve paralysis, ophthalmoplegia such as Duane's Syndrome, Homer's Syndrome, Chronic Progressive External Ophthalmoplegia which includes Keams Syndrome, Strabismus such as Esotropia and Exotropia, Oculomotor Nerve Paralysis, Optic Nerve Diseases such as Optic Atrophy which includes Hereditary Optic Atrophy, Optic Disk Drusen, Optic Neuritis such as Neuromyelitis Optica, Papilledema, Trigeminal Neuralgia, Vocal Cord Paralysis, Demyelinating Diseases such as Neuromyelitis Optica and Swayback, and Diabetic neuropathies such as diabetic foot.

[0657] Additional neurologic diseases which can be treated or detected with polynucleotides, polypeptides, agonists, and/or antagonists of the present invention include nerve compression syndromes such as carpal tunnel syndrome, tarsal tunnel syndrome, thoracic outlet syndrome such as cervical rib syndrome, ulnar nerve compression syndrome, neuralgia such as causalgia, cervico-brachial neuralgia, facial neuralgia and trigeminal neuralgia, neuritis such as experimental allergic neuritis, optic neuritis, polyneuritis, polyradiculoneuritis and radiculities such as polyradiculitis, hereditary motor and sensory neuropathies such as Charcot-Marie Disease, Hereditary Optic Atrophy, Refsum's Disease, Hereditary Spastic Paraplegia and Werdnig-Hoffmann Disease, Hereditary Sensory and Autonomic Neuropathies which include Congenital Analgesia and Familial Dysautonomia, POEMS Syndrome, Sciatica, Gustatory Sweating and Tetany).

### Endocrine Disorders

[0658] Polynucleotides or polypeptides, or agonists or antagonists of the present invention, may be used to treat, prevent, diagnose, and/or prognose disorders and/or diseases related to hormone imbalance, and/or disorders or diseases of the endocrine system.

[0659] Hormones secreted by the glands of the endocrine system control physical growth, sexual function, metabolism, and other functions. Disorders may be classified in two ways: disturbances in the production of hormones, and the inability of tissues to respond to hormones. The etiology of these hormone imbalance or endocrine system diseases, disorders or conditions may be genetic, somatic, such as cancer and some autoimmune diseases, acquired (e.g., by chemotherapy, injury or toxins), or infectious. Moreover, polynucleotides, polypeptides, antibodies, and/or agonists or antagonists of the present invention can be used as a marker or detector of a particular disease or disorder related to the endocrine system and/or hormone imbalance.

[0660] Endocrine system and/or hormone imbalance and/or diseases encompass disorders of uterine motility including, but not limited to: complications with pregnancy and labor (e.g., pre-term labor, post-term pregnancy, spontaneous abortion, and slow or stopped labor); and disorders and/or diseases of the menstrual cycle (e.g., dysmenorrhea and endometriosis).

[0661] Endocrine system and/or hormone imbalance disorders and/or diseases include disorders and/or diseases of the pancreas, such as, for example, diabetes mellitus, diabetes insipidus, congenital pancreatic agenesis, pheochromocytoma—islet cell tumor syndrome; disorders and/or diseases of the adrenal glands such as, for example, Addison's Disease, corticosteroid deficiency, virilizing disease, hirsutism, Cushing's Syndrome, hyperaldosteronism, pheochromocytoma; disorders and/or diseases of the pituitary gland, such as, for example, hyperpituitarism, hypopituitarism, pituitary dwarfism, pituitary adenoma, panhypopituitarism, acromegaly, gigantism; disorders and/or diseases of the thyroid, including but not limited to, hyperthyroidism, hypothyroidism, Plummer's disease, Graves' disease (toxic diffuse goiter), toxic nodular goiter, thyroiditis (Hashimoto's thyroiditis, subacute granulomatous thyroiditis, and silent lymphocytic thyroiditis), Pendred's syndrome, myxedema, cretinism, thyrotoxicosis, thyroid hormone coupling defect, thymic aplasia, Hurthle cell tumours of the thyroid, thyroid cancer, thyroid carcinoma, Medullary thyroid carcinoma; disorders and/or diseases of the parathyroid, such as, for example, hyperparathyroidism, hypoparathyroidism; disorders and/or diseases of the hypothalamus.

[0662] In addition, endocrine system and/or hormone imbalance disorders and/or diseases may also include disorders and/or diseases of the testes or ovaries, including cancer. Other disorders and/or diseases of the testes or ovaries further include, for example, ovarian cancer, polycystic ovary syndrome, Klinefelter's syndrome, vanishing testes syndrome (bilateral anorchia), congenital absence of Leydig's cells, cryptorchidism, Noonan's syndrome, myotonic dystrophy, capillary haemangioma of the testis (benign), neoplasias of the testis and neo-testis.

[0663] Moreover, endocrine system and/or hormone imbalance disorders and/or diseases may also include disorders and/or diseases such as, for example, polyglandular deficiency syndromes, pheochromocytoma, neuroblastoma, multiple Endocrine neoplasia, and disorders and/or cancers of endocrine tissues.

[0664] In another embodiment, a polypeptide of the invention, or polynucleotides, antibodies, agonists, or antagonists corresponding to that polypeptide, may be used to diagnose, prognose, prevent, and/or treat endocrine diseases and/or disorders associated with the tissue(s) in which the polypeptide of the invention is expressed, including one, two, three, four, five, or more tissues disclosed in Table 1A, column 8 (Tissue Distribution Library Code).

### Reproductive System Disorders

[0665] The polynucleotides or polypeptides, or agonists or antagonists of the invention may be used for the diagnosis, treatment, or prevention of diseases and/or disorders of the reproductive system. Reproductive system disorders that can be treated by the compositions of the invention, include, but are not limited to, reproductive system injuries, infections, neoplastic disorders, congenital defects, and diseases or disorders which result in infertility, complications with pregnancy, labor, or parturition, and postpartum difficulties.

[0666] Reproductive system disorders and/or diseases include diseases and/or disorders of the testes, including testicular atrophy, testicular feminization, cryptorchism (unilateral and bilateral), anorchia, ectopic testis, epididymitis and orchitis (typically resulting from infections such as, for example, gonorrhea, mumps, tuberculosis, and syphilis), testicular torsion, vasitis nodosa, germ cell tumors (e.g., seminomas, embryonal cell carcinomas, teratocarcinomas, choriocarcinomas, yolk sac tumors, and teratomas), stromal tumors (e.g., Leydig cell tumors), hydrocele, hematocele, varicocele, spermatocele, inguinal hernia, and disorders of sperm production (e.g., immotile cilia syndrome, aspermia, asthenozoospermia, azoospermia, oligospermia, and teratozoospermia).

[0667] Reproductive system disorders also include disorders of the prostate gland, such as acute non-bacterial prostatitis, chronic non-bacterial prostatitis, acute bacterial prostatitis, chronic bacterial prostatitis, prostatodystonia, prostatosis, granulomatous prostatitis, malacoplakia, benign prostatic hypertrophy or hyperplasia, and prostate neoplastic disorders, including adenocarcinomas, transitional cell carcinomas, ductal carcinomas, and squamous cell carcinomas.

[0668] Additionally, the compositions of the invention may be useful in the diagnosis, treatment, and/or prevention of disorders or diseases of the penis and urethra, including inflammatory disorders, such as balanoposthitis, balanitis xerotica obliterans, phimosis, paraphimosis, syphilis, herpes simplex virus, gonorrhea, non-gonococcal urethritis, chlamydia, mycoplasma, trichomonas, HIV, AIDS, Reiter's syndrome, condyloma acuminatum, condyloma latum, and pearly penile papules; urethral abnormalities, such as hypospadias, epispadias, and phimosis; premalignant lesions, including Erythroplasia of Queyrat, Bowen's disease, Bowenoid paplosis, giant condyloma of Buscke-Lowenstein, and varrucous carcinoma; penile cancers, including squamous cell carcinomas, carcinoma in situ, verrucous carcinoma, and disseminated penile carcinoma; urethral neoplastic disorders, including penile urethral carcinoma, bulbomembranous urethral carcinoma, and prostatic urethral carcinoma; and erectile disorders, such as priapism, Peyronie's disease, erectile dysfunction, and impotence.

[0669] Moreover, diseases and/or disorders of the vas deferens include vasculititis and CBAVD (congenital bilateral absence of the vas deferens); additionally, the polynucleotides, polypeptides, and agonists or antagonists of the present invention may be used in the diagnosis, treatment, and/or prevention of diseases and/or disorders of the seminal vesicles, including hydatid disease, congenital chloride diarrhea, and polycystic kidney disease.

[0670] Other disorders and/or diseases of the male reproductive system include, for example, Klinefelter's syndrome, Young's syndrome, premature ejaculation, diabetes mellitus, cystic fibrosis, Kartagener's syndrome, high fever, multiple sclerosis, and gynecomastia.

[0671] Further, the polynucleotides, polypeptides, and agonists or antagonists of the present invention may be used in the diagnosis, treatment, and/or prevention of diseases and/or disorders of the vagina and vulva, including bacterial vaginosis, candida vaginitis, herpes simplex virus, chancroid, granuloma inguinale, lymphogranuloma venereum, scabies, human papillomavirus, vaginal trauma, vulvar trauma, adenosis, chlamydia vaginitis, gonorrhea, trichomonas vaginitis, condyloma acuminatum, syphilis, molluscum contagiosum, atrophic vaginitis, Paget's disease, lichen sclerosus, lichen planus, vulvodynia, toxic shock syndrome, vaginismus, vulvovaginitis, vulvar vestibulitis, and neoplastic disorders, such as squamous cell hyperplasia, clear cell carcinoma, basal cell carcinoma, melanomas, cancer of Bartholin's gland, and vulvar intraepithelial neoplasia.

[0672] Disorders and/or diseases of the uterus include dysmenorrhea, retroverted uterus, endometriosis, fibroids, adenomyosis, anovulatory bleeding, amenorrhea, Cushing's syndrome, hydatidiform moles, Asherman's syndrome, premature menopause, precocious puberty, uterine polyps, dysfunctional uterine bleeding (e.g., due to aberrant hormonal signals), and neoplastic disorders, such as adenocarcinomas, keiomyosarcomas, and sarcomas. Additionally, the polypeptides, polynucleotides, or agonists or antagonists of the invention may be useful as a marker or detector of, as well as in the diagnosis, treatment, and/or prevention of congenital uterine abnormalities, such as bicomuate uterus, septate uterus, simple unicomuate uterus, unicornuate uterus with a noncavitary rudimentary horn, unicornuate uterus with a non-communicating cavitary rudimentary horn, unicornuate uterus with a communicating cavitary horn, arcuate uterus, uterine didelfus, and T-shaped uterus.

[0673] Ovarian diseases and/or disorders include anovulation, polycystic ovary syndrome (Stein-Leventhal syndrome), ovarian cysts, ovarian hypofunction, ovarian insensitivity to gonadotropins, ovarian overproduction of androgens, right ovarian vein syndrome, amenorrhea, hirutism, and ovarian cancer (including, but not limited to, primary and secondary cancerous growth, Sertoli-Leydig tumors, endometriod carcinoma of the ovary, ovarian papillary serous adenocarcinoma, ovarian mucinous adenocarcinoma, and Ovarian Krukenberg tumors).

[0674] Cervical diseases and/or disorders include cervicitis, chronic cervicitis, mucopurulent cervicitis, cervical dysplasia, cervical polyps, Nabothian cysts, cervical erosion, cervical incompetence, and cervical neoplasms (including, for example, cervical carcinoma, squamous metaplasia, squamous cell carcinoma, adenosquamous cell neoplasia, and columnar cell neoplasia).

[0675] Additionally, diseases and/or disorders of the reproductive system include disorders and/or diseases of pregnancy, including miscarriage and stillbirth, such as early abortion, late abortion, spontaneous abortion, induced abortion, therapeutic abortion, threatened abortion, missed abortion, incomplete abortion, complete abortion, habitual abortion, missed abortion, and septic abortion; ectopic pregnancy, anemia, Rh incompatibility, vaginal bleeding during pregnancy, gestational diabetes, intrauterine growth retardation, polyhydramnios, HELLP syndrome, abruptio placentae, placenta previa, hyperemesis, preeclampsia, eclampsia, herpes gestationis, and urticaria of pregnancy. Additionally, the polynucleotides, polypeptides, and agonists or antagonists of the present invention may be used in the diagnosis, treatment, and/or prevention of diseases that can complicate pregnancy, including heart disease, heart failure, rheumatic heart disease, congenital heart disease, mitral valve prolapse, high blood pressure, anemia, kidney disease, infectious disease (e.g., rubella, cytomegalovirus, toxoplasmosis, infectious hepatitis, chlamydia, HIV, AIDS, and genital herpes), diabetes mellitus, Graves' disease, thyroiditis, hypothyroidism, Hashimoto's thyroiditis, chronic active hepatitis, cirrhosis of the liver, primary biliary cirrhosis, asthma, systemic lupus eryematosis, rheumatoid arthritis, myasthenia gravis, idiopathic thrombocytopenic purpura, appendicitis, ovarian cysts, gallbladder disorders,and obstruction of the intestine.

[0676] Complications associated with labor and parturition include premature rupture of the membranes, pre-term labor, post-term pregnancy, postmaturity, labor that progresses too slowly, fetal distress (e.g., abnormal heart rate (fetal or matemal), breathing problems, and abnormal fetal position), shoulder dystocia, prolapsed umbilical cord, amniotic fluid embolism, and aberrant uterine bleeding.

[0677] Further, diseases and/or disorders of the postdelivery period, including endometritis, myometritis, parametritis, peritonitis, pelvic thrombophlebitis, pulmonary embolism, endotoxemia, pyelonephritis, saphenous thrombophlebitis, mastitis, cystitis, postpartum hemorrhage, and inverted uterus.

[0678] Other disorders and/or diseases of the female reproductive system that may be diagnosed, treated, and/or prevented by the polynucleotides, polypeptides, and agonists or antagonists of the present invention include, for example, Turner's syndrome, pseudohermaphroditism, premenstrual syndrome, pelvic inflammatory disease, pelvic congestion (vascular engorgement), frigidity, anorgasmia, dyspareunia, ruptured fallopian tube, and Mittelschmerz.

### Infectious Disease

[0679] Polynucleotides or polypeptides, as well as agonists or antagonists of the present invention can be used to treat or detect infectious agents. For example, by increasing the immune response, particularly increasing the proliferation and differentiation of B and/or T cells, infectious diseases may be treated. The immune response may be increased by either enhancing an existing immune response, or by initiating a new immune response. Alternatively, polynucleotides or polypeptides, as well as agonists or antagonists of the present invention may also directly inhibit the infectious agent, without necessarily eliciting an immune response.

[0680] Viruses are one example of an infectious agent that can cause disease or symptoms that can be treated or detected by a polynucleotide or polypeptide and/or agonist or antagonist of the present invention. Examples of viruses, include, but are not limited to Examples of viruses, include, but are not limited to the following DNA and RNA viruses and viral families: Arbovirus, Adenoviridae, Arenaviridae, Arterivirus, Bimaviridae, Bunyaviridae, Caliciviridae, Circoviridae, Coronaviridae, Dengue, EBV, HIV, Flaviviridae, Hepadnaviridae (Hepatitis), Herpesviridae (such as, Cytomegalovirus, Herpes Simplex, Herpes Zoster), Mononegavirus (e.g., Paramyxoviridae, Morbillivirus, Rhabdoviridae), Orthomyxoviridae (e.g., Influenza A, Influenza B, and parainfluenza), Papiloma virus, Papovaviridae, Parvoviridae, Picornaviridae, Poxviridae (such as Smallpox or Vaccinia), Reoviridae (e.g., Rotavirus), Retroviridae (HTLV-I, HTLV-II, Lentivirus), and Togaviridae (e.g., Rubivirus). Viruses falling within these families can cause a variety of diseases or symptoms, including, but not limited to: arthritis, bronchiollitis, respiratory syncytial virus, encephalitis, eye infections (e.g., conjunctivitis, keratitis), chronic fatigue syndrome, hepatitis (A, B, C, E, Chronic Active, Delta), Japanese B encephalitis, Junin, Chikungunya, Rift Valley fever, yellow fever, meningitis, opportunistic infections (e.g., AIDS), pneumonia, Burkitt's Lymphoma, chickenpox, hemorrhagic fever, Measles, Mumps, Parainfluenza, Rabies, the common cold, Polio, leukemia, Rubella, sexually transmitted diseases, skin diseases (e.g., Kaposi's, warts), and viremia. polynucleotides or polypeptides, or agonists or antagonists of the invention, can be used to treat or detect any of these symptoms or diseases. In specific embodiments, polynucleotides, polypeptides, or agonists or antagonists of the invention are used to treat: meningitis, Dengue, EBV, and/or hepatitis (e.g., hepatitis B). In an additional specific embodiment polynucleotides, polypeptides, or agonists or antagonists of the invention are used to treat patients nonresponsive to one or more other commercially available hepatitis vaccines. In a further specific embodiment polynucleotides, polypeptides, or agonists or antagonists of the invention are used to treat AIDS.

[0681] Similarly, bacterial and fungal agents that can cause disease or symptoms and that can be treated or detected by a polynucleotide or polypeptide and/or agonist or antagonist of the present invention include, but not limited to, the following Gram-Negative and Gram-positive bacteria, bacterial families, and fungi: Actinomyces (e.g., Norcardia), Acinetobacter, Cryptococcus neoformans, Aspergillus, Bacillaceae (e.g., Bacillus anthrasis), Bacteroides (e.g., Bacteroides fragilis), Blastomycosis, Bordetella, Borrelia (e.g., Borrelia burgdorferi), Brucella, Candidia, Campylobacter, Chlamydia, Clostridium (e.g., Clostridium botulinum, Clostridium dificile, Clostridium perfringens, Clostridium tetani), Coccidioides, Corynebacterium (e.g., Corynebacterium diptheriae), Cryptococcus, Dermatocycoses, E. coli (e.g., Enterotoxigenic E. coli and Enterohemorrhagic E. coli), Enterobacter (e.g. Enterobacter aerogenes), Enterobacteriaceae (Klebsiella, Salmonella (e.g., Salmonella typhi, Salmonella enteritidis, Salmonella typhi), Serratia, Yersinia, Shigella), Erysipelothrix, Haemophilus (e.g., Haemophilus influenza type B), Helicobacter, Legionella (e.g., Legionella pneumophila), Leptospira, Listeria (e.g., Listeria monocytogenes), Mycoplasma, Mycobacterium (e.g., Mycobacterium leprae and Mycobacterium tuberculosis), Vibrio (e.g., Vibrio cholerae), Neisseriaceae (e.g., Neisseria gonorrhea, Neisseria meningitidis), Pasteurellacea, Proteus, Pseudomonas (e.g., Pseudomonas aeruginosa), Rickettsiaceae, Spirochetes (e.g., Treponema spp., Leptospira spp., Borrelia spp.), Shigella spp., Staphylococcus (e.g., Staphylococcus aureus), Meningiococcus, Pneumococcus and Streptococcus (e.g., Streptococcus pneumoniae and Groups A, B, and C Streptococci), and Ureaplasmas. These bacterial, parasitic, and fungal families can cause diseases or symptoms, including, but not limited to: antibiotic-resistant infections, bacteremia, endocarditis, septicemia, eye infections (e.g., conjunctivitis), uveitis, tuberculosis, gingivitis, bacterial diarrhea, opportunistic infections (e.g., AIDS related infections), paronychia, prosthesis-related infections, dental caries, Reiter's Disease, respiratory tract infections, such as Whooping Cough or Empyema, sepsis, Lyme Disease, Cat-Scratch Disease, dysentery, paratyphoid fever, food poisoning, Legionella disease, chronic and acute inflammation, erythema, yeast infections, typhoid, pneumonia, gonorrhea, meningitis (e.g., mengitis types A and B), chlamydia, syphillis, diphtheria, leprosy, brucellosis, peptic ulcers, anthrax, spontaneous abortions, birth defects, pneumonia, lung infections, ear infections, deafness, blindness, lethargy, malaise, vomiting, chronic diarrhea, Crohn's disease, colitis, vaginosis, sterility, pelvic inflammatory diseases, candidiasis, paratuberculosis, tuberculosis, lupus, botulism, gangrene, tetanus, impetigo, Rheumatic Fever, Scarlet Fever, sexually transmitted diseases, skin diseases (e.g., cellulitis, dermatocycoses), toxemia, urinary tract infections, wound infections, noscomial infections. Polynucleotides or polypeptides, agonists or antagonists of the invention, can be used to treat or detect any of these symptoms or diseases. In specific embodiments, polynucleotides, polypeptides, agonists or antagonists of the invention are used to treat: tetanus, diptheria, botulism, and/or meningitis type B.

[0682] Moreover, parasitic agents causing disease or symptoms that can be treated, prevented, and/or diagnosed by a polynucleotide or polypeptide and/or agonist or antagonist of the present invention include, but not limited to, the following families or class: Amebiasis, Babesiosis, Coccidiosis, Cryptosporidiosis, Dientamoebiasis, Dourine, Ectoparasitic, Giardias, Helminthiasis, Leishmaniasis, Schistisoma, Theileriasis, Toxoplasmosis, Trypanosomiasis, and Trichomonas and Sporozoans (e.g., Plasmodium virax, Plasmodium falciparium, Plasmodium malariae and Plasmodium ovale). These parasites can cause a variety of diseases or symptoms, including, but not limited to: Scabies, Trombiculiasis, eye infections, intestinal disease (e.g., dysentery, giardiasis), liver disease, lung disease, opportunistic infections (e.g., AIDS related), malaria, pregnancy complications, and toxoplasmosis. polynucleotides or polypeptides, or agonists or antagonists of the invention, can be used to treat, prevent, and/or diagnose any of these symptoms or diseases. In specific embodiments, polynucleotides, polypeptides, or agonists or antagonists of the invention are used to treat, prevent, and/or diagnose malaria.

[0683] Polynucleotides or polypeptides, as well as agonists or antagonists of the present invention of the present invention could either be by administering an effective amount of a polypeptide to the patient, or by removing cells from the patient, supplying the cells with a polynucleotide of the present invention, and returning the engineered cells to the patient (ex vivo therapy). Moreover, the polypeptide or polynucleotide of the present invention can be used as an antigen in a vaccine to raise an immune response against infectious disease.

### Regeneration

[0684] Polynucleotides or polypeptides, as well as agonists or antagonists of the present invention can be used to differentiate, proliferate, and attract cells, leading to the regeneration of tissues. (See, Science 276:59-87 (1997)). The regeneration of tissues could be used to repair, replace, or protect tissue damaged by congenital defects, trauma (wounds, burns, incisions, or ulcers), age, disease (e.g. osteoporosis, osteocarthritis, periodontal disease, liver failure), surgery, including cosmetic plastic surgery, fibrosis, reperfusion injury, or systemic cytokine damage.

[0685] Tissues that could be regenerated using the present invention include organs (e.g., pancreas, liver, intestine, kidney, skin, endothelium), muscle (smooth, skeletal or cardiac), vasculature (including vascular and lymphatics), nervous, hematopoietic, and skeletal (bone, cartilage, tendon, and ligament) tissue. Preferably, regeneration occurs without or decreased scarring. Regeneration also may include angiogenesis.

[0686] Moreover, polynucleotides or polypeptides, as well as agonists or antagonists of the present invention, may increase regeneration of tissues difficult to heal. For example, increased tendon/ligamnent regeneration would quicken recovery time after damage. Polynucleotides or polypeptides, as well as agonists or antagonists of the present invention could also be used prophylactically in an effort to avoid damage. Specific diseases that could be treated include of tendinitis, carpal tunnel syndrome, and other tendon or ligament defects. A further example of tissue regeneration of non-healing wounds includes pressure ulcers, ulcers associated with vascular insufficiency, surgical, and traumatic wounds.

[0687] Similarly, nerve and brain tissue could also be regenerated by using polynucleotides or polypeptides, as well as agonists or antagonists of the present invention, to proliferate and differentiate nerve cells. Diseases that could be treated using this method include central and peripheral nervous system diseases, neuropathies, or mechanical and traumatic disorders (e.g., spinal cord disorders, head trauma, cerebrovascular disease, and stoke). Specifically, diseases associated with peripheral nerve injuries, peripheral neuropathy (e.g., resulting from chemotherapy or other medical therapies), localized neuropathies, and central nervous system diseases (e.g., Alzheimer's disease, Parkinson's disease, Huntington's disease, amyotrophic lateral sclerosis, and Shy-Drager syndrome), could all be treated using the polynucleotides or polypeptides, as well as agonists or antagonists of the present invention.

### Gastrointestinal Disorders

[0688] Polynucleotides or polypeptides, or agonists or antagonists of the present invention, may be used to treat, prevent, diagnose, and/or prognose gastrointestinal disorders, including inflammatory diseases and/or conditions, infections, cancers (e.g., intestinal neoplasms (carcinoid tumor of the small intestine, non-Hodgkin's lymphoma of the small intestine, small bowl lymphoma)), and ulcers, such as peptic ulcers.

[0689] Gastrointestinal disorders include dysphagia, odynophagia, inflammation of the esophagus, peptic esophagitis, gastric reflux, submucosal fibrosis and stricturing, Mallory-Weiss lesions, leiomyomas, lipomas, epidermal cancers, adeoncarcinomas, gastric retention disorders, gastroenteritis, gastric atrophy, gastric/stomach cancers, polyps of the stomach, autoimmune disorders such as pernicious anemia, pyloric stenosis, gastritis (bacterial, viral, eosinophilic, stress-induced, chronic erosive, atrophic, plasma cell, and Ménétrier's), and peritoneal diseases (e.g., chyloperioneum, hemoperitoneum, mesenteric cyst, mesenteric lymphadenitis, mesenteric vascular occlusion, panniculitis, neoplasms, peritonitis, pneumoperitoneum, bubphrenic abscess,).

[0690] Gastrointestinal disorders also include disorders associated with the small intestine, such as malabsorption syndromes, distension, irritable bowel syndrome, sugar intolerance, celiac disease, duodenal ulcers, duodenitis, tropical sprue, Whipple's disease, intestinal lymphangiectasia, Crohn's disease, appendicitis, obstructions of the ileum, Meckel's diverticulum, multiple diverticula, failure of complete rotation of the small and large intestine, lymphoma, and bacterial and parasitic diseases (such as Traveler's diarrhea, typhoid and paratyphoid, cholera, infection by Roundworms (Ascariasis lumbricoides), Hookworms (Ancylostoma duodenale), Threadworms (Enterobius vermicularis), Tapeworms (Taenia saginata, Echinococcus granulosus, Diphyllobothrium spp., and T. solium).

[0691] Liver diseases and/or disorders include intrahepatic cholestasis (alagille syndrome, biliary liver cirrhosis), fatty liver (alcoholic fatty liver, reye syndrome), hepatic vein thrombosis, hepatolentricular degeneration, hepatomegaly, hepatopulmonary syndrome, hepatorenal syndrome, portal hypertension (esophageal and gastric varices), liver abscess (amebic liver abscess), liver cirrhosis (alcoholic, biliary and experimental), alcoholic liver diseases (fatty liver, hepatitis, cirrhosis), parasitic (hepatic echinococcosis, fascioliasis, amebic liver abscess), jaundice (hemolytic, hepatocellular, and cholestatic), cholestasis, portal hypertension, liver enlargement, ascites, hepatitis (alcoholic hepatitis, animal hepatitis, chronic hepatitis (autoimmune, hepatitis B, hepatitis C, hepatitis D, drug induced), toxic hepatitis, viral human hepatitis (hepatitis A, hepatitis B, hepatitis C, hepatitis D, hepatitis E), Wilson's disease, granulomatous hepatitis, secondary biliary cirrhosis, hepatic encephalopathy, portal hypertension, varices, hepatic encephalopathy, primary biliary cirrhosis, primary sclerosing cholangitis, hepatocellular adenoma, hemangiomas, bile stones, liver failure (hepatic encephalopathy, acute liver failure), and liver neoplasms (angiomyolipoma, calcified liver metastases, cystic liver metastases, epithelial tumors, fibrolamellar hepatocarcinoma, focal nodular hyperplasia, hepatic adenoma, hepatobiliary cystadenoma, hepatoblastoma, hepatocellular carcinoma, hepatoma, liver cancer, liver hemangioendothelioma, mesenchymal hamartoma, mesenchymal tumors of liver, nodular regenerative hyperplasia, benign liver tumors (Hepatic cysts [Simple cysts, Polycystic liver disease, Hepatobiliary cystadenoma, Choledochal cyst], Mesenchymal tumors [Mesenchymal hamartoma, Infantile hemangioendothelioma, Hemangioma, Peliosis hepatis, Lipomas, Inflammatory pseudotumor, Miscellaneous], Epithelial tumors [Bile duct epithelium (Bile duct hamartoma, Bile duct adenoma), Hepatocyte (Adenoma, Focal nodular hyperplasia, Nodular regenerative hyperplasia)], malignant liver tumors [hepatocellular, hepatoblastoma, hepatocellular carcinoma, cholangiocellular, cholangiocarcinoma, cystadenocarcinoma, tumors of blood vessels, angiosarcoma, Karposi's sarcoma, hemangioendothelioma, other tumors, embryonal sarcoma, fibrosarcoma, leiomyosarcoma, rhabdomyosarcoma, carcinosarcoma, teratoma, carcinoid, squamous carcinoma, primary lymphoma]), peliosis hepatis, erythrohepatic porphyria, hepatic porphyria (acute intermittent porphyria, porphyria cutanea tarda), Zellweger syndrome).

[0692] Pancreatic diseases and/or disorders include acute pancreatitis, chronic pancreatitis (acute necrotizing pancreatitis, alcoholic pancreatitis), neoplasms (adenocarcinoma of the pancreas, cystadenocarcinoma, insulinoma, gastrinoma, and glucagonoma, cystic neoplasms, islet-cell tumors, pancreoblastoma), and other pancreatic diseases (e.g., cystic fibrosis, cyst (pancreatic pseudocyst, pancreatic fistula, insufficiency)).

[0693] Gallbladder diseases include gallstones (cholelithiasis and choledocholithiasis), postcholecystectomy syndrome, diverticulosis of the gallbladder, acute cholecystitis, chronic cholecystitis, bile duct tumors, and mucocele.

[0694] Diseases and/or disorders of the large intestine include antibiotic-associated colitis, diverticulitis, ulcerative colitis, acquired megacolon, abscesses, fungal and bacterial infections, anorectal disorders (e.g., fissures, hemorrhoids), colonic diseases (colitis, colonic neoplasms [colon cancer, adenomatous colon polyps (e.g., villous adenoma), colon carcinoma, colorectal cancer], colonic diverticulitis, colonic diverticulosis, megacolon [Hirschsprung disease, toxic megacolon]; sigmoid diseases [proctocolitis, sigmoin neoplasms]), constipation, Crohn's disease, diarrhea (infantile diarrhea, dysentery), duodenal diseases (duodenal neoplasms, duodenal obstruction, duodenal ulcer, duodenitis), enteritis (enterocolitis), HIV enteropathy, ileal diseases (ileal neoplasms, ileitis), immunoproliferative small intestinal disease, inflammatory bowel disease (ulcerative colitis, Crohn's disease), intestinal atresia, parasitic diseases (anisakiasis, balantidiasis, blastocystis infections, cryptosporidiosis, dientamoebiasis, amebic dysentery, giardiasis), intestinal fistula (rectal fistula), intestinal neoplasms (cecal neoplasms, colonic neoplasms, duodenal neoplasms, ileal neoplasms, intestinal potyps, jejunal neoplasms, rectal neoplasms), intestinal obstruction (afferent loop syndrome, duodenal obstruction, impacted feces, intestinal pseudo-obstruction [cecal volvulus], intussusception), intestinal perforation, intestinal polyps (colonic polyps, gardner syndrome, peutz-jeghers syndrome), jejunal diseases (jejunal neoplasms), malabsorption syndromes (blind loop syndrome, celiac disease, lactose intolerance, short bowl syndrome, tropical sprue, whipple's disease), mesenteric vascular occlusion, pneumatosis cystoides intestinalis, protein-losing enteropathies (intestinal lymphagiectasis), rectal diseases (anus diseases, fecal incontinence, hemorrhoids, proctitis, rectal fistula, rectal prolapse, rectocele), peptic ulcer (duodenal ulcer, peptic esophagitis, hemorrhage, perforation, stomach ulcer, Zollinger-Ellison syndrome), postgastrectomy syndromes (dumping syndrome), stomach diseases (e.g., achlorhydria, duodenogastric reflux (bile reflux), gastric antral vascular ectasia, gastric fistula, gastric outlet obstruction, gastritis (atrophic or hypertrophic), gastroparesis, stomach dilatation, stomach diverticulum, stomach neoplasms (gastric cancer, gastric polyps, gastric adenocarcinoma, hyperplastic gastric polyp), stomach rupture, stomach ulcer, stomach volvulus), tuberculosis, visceroptosis, vomiting (e.g., hematemesis, hyperemesis gravidarum, postoperative nausea and vomiting) and hemorrhagic colitis.

[0695] Further diseases and/or disorders of the gastrointestinal system include biliary tract diseases, such as, gastroschisis, fistula (e.g., biliary fistula, esophageal fistula, gastric fistula, intestinal fistula, pancreatic fistula), neoplasms (e.g., biliary tract neoplasms, esophageal neoplasms, such as adenocarcinoma of the esophagus, esophageal squamous cell carcinoma, gastrointestinal neoplasms, pancreatic neoplasms, such as adenocarcinoma of the pancreas, mucinous cystic neoplasm of the pancreas, pancreatic cystic neoplasms, pancreatoblastoma, and peritoneal neoplasms), esophageal disease (e.g., bullous diseases, candidiasis, glycogenic acanthosis, ulceration, barrett esophagus varices, atresia, cyst, diverticulum (e.g., Zenker's diverticulum), fistula (e.g., tracheoesophageal fistula), motility disorders (e.g., CREST syndrome, deglutition disorders, achalasia, spasm, gastroesophageal reflux), neoplasms, perforation (e.g., Boerhaave syndrome, Mallory-Weiss syndrome), stenosis, esophagitis, diaphragmatic hernia (e.g., hiatal hernia); gastrointestinal diseases, such as, gastroenteritis (e.g., cholera morbus, norwalk virus infection), hemorrhage (e.g., hematemesis, melena, peptic ulcer hemorrhage), stomach neoplasms (gastric cancer, gastric polyps, gastric adenocarcinoma, stomach cancer)), hernia (e.g., congenital diaphragmatic hernia, femoral hernia, inguinal hernia, obturator hernia, umbilical hernia, ventral hernia), and intestinal diseases (e.g., cecal diseases (appendicitis, cecal neoplasms)).

### Chemotaxis

[0696] Polynucleotides or polypeptides, as well as agonists or antagonists of the present invention may have chemotaxis activity. A chemotaxic molecule attracts or mobilizes cells (e.g., monocytes, fibroblasts, neutrophils, T-cells, mast cells, eosinophils, epithelial and/or endothelial cells) to a particular site in the body, such as inflammation, infection, or site of hyperproliferation. The mobilized cells can then fight off and/or heal the particular trauma or abnormality.

[0697] Polynucleotides or polypeptides, as well as agonists or antagonists of the present invention may increase chemotaxic activity of particular cells. These chemotactic molecules can then be used to treat inflammation, infection, hyperproliferative disorders, or any immune system disorder by increasing the number of cells targeted to a particular location in the body. For example, chemotaxic molecules can be used to treat wounds and other trauma to tissues by attracting immune cells to the injured location. Chemotactic molecules of the present invention can also attract fibroblasts, which can be used to treat wounds.

[0698] It is also contemplated that polynucleotides or polypeptides, as well as agonists or antagonists of the present invention may inhibit chemotactic activity. These molecules could also be used to treat disorders. Thus, polynucleotides or polypeptides, as well as agonists or antagonists of the present invention could be used as an inhibitor of chemotaxis.

### Binding Activity

[0699] A polypeptide of the present invention may be used to screen for molecules that bind to the polypeptide or for molecules to which the polypeptide binds. The binding of the polypeptide and the molecule may activate (agonist), increase, inhibit (antagonist), or decrease activity of the polypeptide or the molecule bound. Examples of such molecules include antibodies, oligonucleotides, proteins (e.g., receptors),or small molecules.

[0700] Preferably, the molecule is closely related to the natural ligand of the polypeptide, e.g., a fragment of the ligand, or a natural substrate, a ligand, a structural or functional mimetic. (See, Coligan et al., Current Protocols in Immunology 1(2):Chapter 5 (1991)). Similarly, the molecule can be closely related to the natural receptor to which the polypeptide binds, or at least, a fragment of the receptor capable of being bound by the polypeptide (e.g., active site). In either case, the molecule can be rationally designed using known techniques.

[0701] Preferably, the screening for these molecules involves producing appropriate cells which express the polypeptide. Preferred cells include cells from mammals, yeast, Drosophila, or E. coli. Cells expressing the polypeptide (or cell membrane containing the expressed polypeptide) are then preferably contacted with a test compound potentially containing the molecule to observe binding, stimulation, or inhibition of activity of either the polypeptide or the molecule.

[0702] The assay may simply test binding of a candidate compound to the polypeptide, wherein binding is detected by a label, or in an assay involving competition with a labeled competitor. Further, the assay may test whether the candidate compound results in a signal generated by binding to the polypeptide.

[0703] Alternatively, the assay can be carried out using cell-free preparations, polypeptide/molecule affixed to a solid support, chemical libraries, or natural product mixtures. The assay may also simply comprise the steps of mixing a candidate compound with a solution containing a polypeptide, measuring polypeptide/molecule activity or binding, and comparing the polypeptide/molecule activity or binding to a standard.

[0704] Preferably, an ELISA assay can measure polypeptide level or activity in a sample (e.g., biological sample) using a monoclonal or polyclonal antibody. The antibody can measure polypeptide level or activity by either binding, directly or indirectly, to the polypeptide or by competing with the polypeptide for a substrate.

[0705] Additionally, the receptor to which the polypeptide of the present invention binds can be identified by numerous methods known to those of skill in the art, for example, ligand panning and FACS sorting (Coligan, et al., Current Protocols in Immun., 1(2), Chapter 5, (1991)). For example, expression cloning is employed wherein polyadenylated RNA is prepared from a cell responsive to the polypeptides, for example, NIH3T3 cells which are known to contain multiple receptors for the FGF family proteins, and SC-3 cells, and a cDNA library created from this RNA is divided into pools and used to transfect COS cells or other cells that are not responsive to the polypeptides. Transfected cells which are grown on glass slides are exposed to the polypeptide of the present invention, after they have been labeled. The polypeptides can be labeled by a variety of means including iodination or inclusion of a recognition site for a site-specific protein kinase.

[0706] Following fixation and incubation, the slides are subjected to auto-radiographic analysis. Positive pools are identified and sub-pools are prepared and re-transfected using an iterative sub-pooling and re-screening process, eventually yielding a single clones that encodes the putative receptor.

[0707] As an alternative approach for receptor identification, the labeled polypeptides can be photoaffinity linked with cell membrane or extract preparations that express the receptor molecule. Cross-linked material is resolved by PAGE analysis and exposed to X-ray film. The labeled complex containing the receptors of the polypeptides can be excised, resolved into peptide fragments, and subjected to protein microsequencing. The amino acid sequence obtained from microsequencing would be used to design a set of degenerate oligonucleotide probes to screen a cDNA library to identify the genes encoding the putative receptors.

[0708] Moreover, the techniques of gene-shuffling, motif-shuffling, exon-shuffling, and/or codon-shuffling (collectively referred to as “DNA shuffling”) may be employed to modulate the activities of the polypeptide of the present invention thereby effectively generating agonists and antagonists of the polypeptide of the present invention. See generally, U.S. Pat. Nos. 5,605,793, 5,811,238, 5,830,721, 5,834,252, and 5,837,458, and Patten, P. A., et al., Curr. Opinion Biotechnol. 8:724-33 (1997); Harayama, S. Trends Biotechnol. 16(2):76-82 (1998); Hansson, L. O., et aL, J. Mol. Biol. 287:265-76 (1999); and Lorenzo, M. M. and Blasco, R. Biotechniques 24(2):308-13 (1998); each of these patents and publications are hereby incorporated by reference). In one embodiment, alteration of polynucleotides and corresponding polypeptides may be achieved by DNA shuffling. DNA shuffling involves the assembly of two or more DNA segments into a desired molecule by homologous, or site-specific, recombination. In another embodiment, polynucleotides and corresponding polypeptides may be altered by being subjected to random mutagenesis by error-prone PCR, random nucleotide insertion or other methods prior to recombination. In another embodiment, one or more components, motifs, sections, parts, domains, fragments, etc., of the polypeptide of the present invention may be recombined with one or more components, motifs, sections, parts, domains, fragments, etc. of one or more heterologous molecules. In preferred embodiments, the heterologous molecules are family members. In further preferred embodiments, the heterologous molecule is a growth factor such as, for example, platelet-derived growth factor (PDGF), insulin-like growth factor (IGF-I), transforming growth factor (TGF)-alpha, epidermal growth factor (EGF), fibroblast growth factor (FGF), TGF-beta, bone morphogenetic protein (BMP)-2, BMP-4, BMP-5, BMP-6, BMP-7, activins A and B, decapentaplegic(dpp), 60A, OP-2, dorsalin, growth differentiation factors (GDFs), nodal, MIS, inhibin-alpha, TGF-betal, TGF-beta2, TGF-beta3, TGF-beta5, and glial-derived neurotrophic factor (GDNF).

[0709] Other preferred fragments are biologically active fragments of the polypeptide of the present invention. Biologically active fragments are those exhibiting activity similar, but not necessarily identical, to an activity of the polypeptide of the present invention. The biological activity of the fragments may include an improved desired activity, or a decreased undesirable activity.

[0710] Additionally, this invention provides a method of screening compounds to identify those which modulate the action of the polypeptide of the present invention. An example of such an assay comprises combining a mammalian fibroblast cell, a the polypeptide of the present invention, the compound to be screened and ³[H] thymidine under cell culture conditions where the fibroblast cell would normally proliferate. A control assay may be performed in the absence of the compound to be screened and compared to the amount of fibroblast proliferation in the presence of the compound to determine if the compound stimulates proliferation by determining the uptake of ³[H] thymidine in each case. The amount of fibroblast cell proliferation is measured by liquid scintillation chromatography which measures the incorporation of ³[H] thymidine. Both agonist and antagonist compounds may be identified by this procedure.

[0711] In another method, a mammalian cell or membrane preparation expressing a receptor for a polypeptide of the present invention is incubated with a labeled polypeptide of the present invention in the presence of the compound. The ability of the compound to enhance or block this interaction could then be measured. Alternatively, the response of a known second messenger system following interaction of a compound to be screened and the receptor is measured and the ability of the compound to bind to the receptor and elicit a second messenger response is measured to determine if the compound is a potential agonist or antagonist. Such second messenger systems include but are not limited to, cAMP guanylate cyclase, ion channels or phosphoinositide hydrolysis.

[0712] All of these above assays can be used as diagnostic or prognostic markers. The molecules discovered using these assays can be used to treat disease or to bring about a particular result in a patient (e.g., blood vessel growth) by activating or inhibiting the polypeptide/molecule. Moreover, the assays can discover agents which may inhibit or enhance the production of the polypeptides of the invention from suitably manipulated cells or tissues.

[0713] Therefore, the invention includes a method of identifying compounds which bind to a polypeptide of the invention comprising the steps of: (a) incubating a candidate binding compound with a polypeptide of the present invention; and (b) determining if binding has occurred. Moreover, the invention includes a method of identifying agonists/antagonists comprising the steps of: (a) incubating a candidate compound with a polypeptide of the present invention, (b) assaying a biological activity, and (b) determining if a biological activity of the polypeptide has been altered.

### Targeted Delivery

[0714] In another embodiment, the invention provides a method of delivering compositions to targeted cells expressing a receptor for a polypeptide of the invention, or cells expressing a cell bound form of a polypeptide of the invention.

[0715] As discussed herein, polypeptides or antibodies of the invention maybe associated with heterologous polypeptides, heterologous nucleic acids, toxins, or prodrugs via hydrophobic, hydrophilic, ionic and/or covalent interactions. In one embodiment, the invention provides a method for the specific delivery of compositions of the invention to cells by administering polypeptides of the invention (including antibodies) that are associated with heterologous polypeptides or nucleic acids. In one example, the invention provides a method for delivering a therapeutic protein into the targeted cell. In another example, the invention provides a method for delivering a single stranded nucleic acid (e.g., antisense or ribozymes) or double stranded nucleic acid (e.g., DNA that can integrate into the cell's genome or replicate episomally and that can be transcribed) into the targeted cell.

[0716] In another embodiment, the invention provides a method for the specific destruction of cells (e.g., the destruction of tumor cells) by administering polypeptides of the invention (e.g., polypeptides of the invention or antibodies of the invention) in association with toxins or cytotoxic prodrugs.

[0717] By “toxin” is meant compounds that bind and activate endogenous cytotoxic effector systems, radioisotopes, holotoxins, modified toxins, catalytic subunits of toxins, or any molecules or enzymes not normally present in or on the surface of a cell that under defined conditions cause the cell's death. Toxins that may be used according to the methods of the invention include, but are not limited to, radioisotopes known in the art, compounds such as, for example, antibodies (or complement fixing containing portions thereof) that bind an inherent or induced endogenous cytotoxic effector system, thymidine kinase, endonuclease, RNAse, alpha toxin, ricin, abrin, Pseudomonas exotoxin A, diphtheria toxin, saporin, momordin, gelonin, pokeweed antiviral protein, alpha-sarcin and cholera toxin. By “cytotoxic prodrug” is meant a non-toxic compound that is converted by an enzyme, normally present in the cell, into a cytotoxic compound. Cytotoxic prodrugs that may be used according to the methods of the invention include, but are not limited to, glutamyl derivatives of benzoic acid mustard alkylating agent, phosphate derivatives of etoposide or mitomycin C, cytosine arabinoside, daunorubisin, and phenoxyacetamide derivatives of doxorubicin.

### Drug Screening

[0718] Further contemplated is the use of the polypeptides of the present invention, or the polynucleotides encoding these polypeptides, to screen for molecules which modify the activities of the polypeptides of the present invention. Such a method would include contacting the polypeptide of the present invention with a selected compound(s) suspected of having antagonist or agonist activity, and assaying the activity of these polypeptides following binding.

[0719] This invention is particularly useful for screening therapeutic compounds by using the polypeptides of the present invention, or binding fragments thereof, in any of a variety of drug screening techniques. The polypeptide or fragment employed in such a test may be affixed to a solid support, expressed on a cell surface, free in solution, or located intracellularly. One method of drug screening utilizes eukaryotic or prokaryotic host cells which are stably transformed with recombinant nucleic acids expressing the polypeptide or fragment. Drugs are screened against such transformed cells in competitive binding assays. One may measure, for example, the formulation of complexes between the agent being tested and a polypeptide of the present invention.

[0720] Thus, the present invention provides methods of screening for drugs or any other agents which affect activities mediated by the polypeptides of the present invention. These methods comprise contacting such an agent with a polypeptide of the present invention or a fragment thereof and assaying for the presence of a complex between the agent and the polypeptide or a fragment thereof, by methods well known in the art. In such a competitive binding assay, the agents to screen are typically labeled. Following incubation, free agent is separated from that present in bound form, and the amount of free or uncomplexed label is a measure of the ability of a particular agent to bind to the polypeptides of the present invention.

[0721] Another technique for drug screening provides high throughput screening for compounds having suitable binding affinity to the polypeptides of the present invention, and is described in great detail in European Patent Application 84/03564, published on Sep. 13, 1984, which is incorporated herein by reference herein. Briefly stated, large numbers of different small peptide test compounds are synthesized on a solid substrate, such as plastic pins or some other surface. The peptide test compounds are reacted with polypeptides of the present invention and washed. Bound polypeptides are then detected by methods well known in the art. Purified polypeptides are coated directly onto plates for use in the aforementioned drug screening techniques. In addition, non-neutralizing antibodies may be used to capture the peptide and immobilize it on the solid support.

[0722] This invention also contemplates the use of competitive drug screening assays in which neutralizing antibodies capable of binding polypeptides of the present invention specifically compete with a test compound for binding to the polypeptides or fragments thereof. In this manner, the antibodies are used to detect the presence of any peptide which shares one or more antigenic epitopes with a polypeptide of the invention.

### Antisense and Ribozyme (Antagonists)

[0723] In specific embodiments, antagonists according to the present invention are nucleic acids corresponding to the sequences contained in SEQ ID NO:X, or the complementary strand thereof, and/or to cDNA sequences contained in cDNA Clone ID NO:Z identified for example, in Table 1A. In one embodiment, antisense sequence is generated internally, by the organism, in another embodiment, the antisense sequence is separately administered (see, for example, O'Connor, J., Neurochem. 56:560 (1991). Oligodeoxynucleotides as Antisense Inhibitors of Gene Expression, CRC Press, Boca Raton, Fla. (1988). Antisense technology can be used to control gene expression through antisense DNA or RNA, or through triple helix formation. Antisense techniques are discussed for example, in Okano, J., Neurochem. 56:560 (1991); Oligodeoxynucleotides as Antisense Inhibitors of Gene Expression, CRC Press, Boca Raton, Fla. (1988). Triple helix formation is discussed in, for instance, Lee et al., Nucleic Acids Research 6:3073 (1979); Cooney et al., Science 241:456 (1988); and Dervan et al., Science 251:1300 (1991). The methods are based on binding of a polynucleotide to a complementary DNA or RNA.

[0724] For example, the use of c-myc and c-myb antisense RNA constructs to inhibit the growth of the non-lymphocytic leukemia cell line HL-60 and other cell lines was previously described. (Wickstrom et al. (1988); Anfossi et al. (1989)). These experiments were performed in vitro by incubating cells with the oligoribonucleotide. A similar procedure for in vivo use is described in WO 91/15580. Briefly, a pair of oligonucleotides for a given antisense RNA is produced as follows: A sequence complimentary to the first 15 bases of the open reading frame is flanked by an EcoR1 site on the 5 end and a Hind III site on the 3 end. Next, the pair of oligonucleotides is heated at 90° C. for one minute and then annealed in 2× ligation buffer (20 mM TRIS HCl pH 7.5, 10 mM MgC12, 10MM dithiothreitol (DTT) and 0.2 mM ATP) and then ligated to the EcoR1/Hind III site of the retroviral vector PMV7 (WO 91/15580).

[0725] For example, the 5′ coding portion of a polynucleotide that encodes the polypeptide of the present invention may be used to design an antisense RNA oligonucleotide of from about 10 to 40 base pairs in length. A DNA oligonucleotide is designed to be complementary to a region of the gene involved in transcription thereby preventing transcription and the production of the receptor. The antisense RNA oligonucleotide hybridizes to the mRNA in vivo and blocks translation of the mRNA molecule into receptor polypeptide.

[0726] In one embodiment, the antisense nucleic acid of the invention is produced intracellularly by transcription from an exogenous sequence. For example, a vector or a portion thereof, is transcribed, producing an antisense nucleic acid (RNA) of the invention. Such a vector would contain a sequence encoding the antisense nucleic acid. Such a vector can remain episomal or become chromosomally integrated, as long as it can be transcribed to produce the desired antisense RNA. Such vectors can be constructed by recombinant DNA technology methods standard in the art. Vectors can be plasmid, viral, or others known in the art, used for replication and expression in vertebrate cells. Expression of the sequence encoding the polypeptide of the present invention or fragments thereof, can be by any promoter known in the art to act in vertebrate, preferably human cells. Such promoters can be inducible or constitutive. Such promoters include, but are not limited to, the SV40 early promoter region (Bemoist and Chambon, Nature 29:304-310 (1981), the promoter contained in the 3′ long terminal repeat of Rous sarcoma virus (Yamamoto et al., Cell 22:787-797 (1980), the herpes thymidine promoter (Wagner et al., Proc. Natl. Acad. Sci. U.S.A. 78:1441-1445 (1981), the regulatory sequences of the metallothionein gene (Brinster, et al., Nature 296:39-42 (1982)), etc.

[0727] The antisense nucleic acids of the invention comprise a sequence complementary to at least a portion of an RNA transcript of a gene of the present invention. However, absolute complementarity, although preferred, is not required. A sequence “complementary to at least a portion of an RNA,” referred to herein, means a sequence having sufficient complementarity to be able to hybridize with the RNA, forming a stable duplex; in the case of double stranded antisense nucleic acids, a single strand of the duplex DNA may thus be tested, or triplex formation may be assayed. The ability to hybridize will depend on both the degree of complementarity and the length of the antisense nucleic acid. Generally, the larger the hybridizing nucleic acid, the more base mismatches with a RNA it may contain and still form a stable duplex (or triplex as the case may be). One skilled in the art can ascertain a tolerable degree of mismatch by use of standard procedures to determine the melting point of the hybridized complex.

[0728] Oligonucleotides that are complementary to the 5′ end of the message, e.g., the 5′ untranslated sequence up to and including the AUG initiation codon, should work most efficiently at inhibiting translation. However, sequences complementary to the 3′ untranslated sequences of mRNAs have been shown to be effective at inhibiting translation of mRNAs as well. See generally, Wagner, R., 1994, Nature 372:333-335. Thus, oligonucleotides complementary to either the 5′- or 3′- non-translated, non-coding regions of polynucleotide sequences described herein could be used in an antisense approach to inhibit translation of endogenous mRNA. Oligonucleotides complementary to the 5′ untranslated region of the mRNA should include the complement of the AUG start codon. Antisense oligonucleotides complementary to mRNA coding regions are less efficient inhibitors of translation but could be used in accordance with the invention. Whether designed to hybridize to the 5′-, 3′-or coding region of mRNA of the present invention, antisense nucleic acids should be at least six nucleotides in length, and are preferably oligonucleotides ranging from 6 to about 50 nucleotides in length. In specific aspects the oligonucleotide is at least 10 nucleotides, at least 17 nucleotides, at least 25 nucleotides or at least 50 nucleotides.

[0729] The polynucleotides of the invention can be DNA or RNA or chimeric mixtures or derivatives or modified versions thereof, single-stranded or double-stranded. The oligonucleotide can be modified at the base moiety, sugar moiety, or phosphate backbone, for example, to improve stability of the molecule, hybridization, etc. The oligonucleotide may include other appended groups such as peptides (e.g., for targeting host cell receptors in vivo), or agents facilitating transport across the cell membrane (see, e.g., Letsinger et al., 1989, Proc. Natl. Acad. Sci. U.S.A. 86:6553-6556; Lemaitre et al., 1987, Proc. Natl. Acad. Sci. 84:648-652; PCT Publication No. WO88/09810, published Dec. 15, 1988) or the blood-brain barrier (see, e.g., PCT Publication No. WO89/10134, published Apr. 25, 1988), hybridization-triggered cleavage agents. (See, e.g., Krol et al., 1988, BioTechniques 6:958-976 ) or intercalating agents. (See, e.g., Zon, 1988, Pharm. Res. 5:539-549). To this end, the oligonucleotide may be conjugated to another molecule, e.g., a peptide, hybridization triggered cross-linking agent, transport agent, hybridization-triggered cleavage agent, etc.

[0730] The antisense oligonucleotide may comprise at least one modified base moiety which is selected from the group including, but not limited to, 5-fluorouracil, 5-bromouracil, 5-chlorouracil, 5-iodouracil, hypoxanthine, xantine, 4-acetylcytosine, 5-(carboxyhydroxylmethyl) uracil, 5-carboxymethylaminomethyl-2-thiouridine, 5-carboxymethylaminomethyluracil, dihydrouracil, beta-D-galactosylqueosine, inosine, N6-isopentenyladenine, 1-methylguanine, 1-methylinosine, 2,2-dimethylguanine, 2-methyladenine, 2-methylguanine, 3-methylcytosine, 5-methylcytosine, N6-adenine, 7-methylguanine, 5-methylaminomethyluracil, 5-methoxyaminomethyl-2-thiouracil, beta-D-mannosylqueosine, 5′-methoxycarboxymethyluracil, 5-methoxyuracil, 2-methylthio-N6-isopentenyladenine, uracil-5-oxyacetic acid (v), wybutoxosine, pseudouracil, queosine, 2-thiocytosine, 5-methyl-2-thiouracil, 2-thiouracil, 4-thiouracil, 5-methyluracil, uracil-5-oxyacetic acid methylester, uracil-5-oxyacetic acid (v), 5-methyl-2-thiouracil, 3-(3-amino-3-N-2-carboxypropyl) uracil, (acp3)w, and 2,6-diaminopurine.

[0731] The antisense oligonucleotide may also comprise at least one modified sugar moiety selected from the group including, but not limited to, arabinose, 2-fluoroarabinose, xylulose, and hexose.

[0732] In yet another embodiment, the antisense oligonucleotide comprises at least one modified phosphate backbone selected from the group including, but not limited to, a phosphorothioate, a phosphorodithioate, a phosphoramidothioate, a phosphoramidate, a phosphordiamidate, a methylphosphonate, an alkyl phosphotriester, and a formacetal or analog thereof.

[0733] In yet another embodiment, the antisense oligonucleotide is an a-anomeric oligonucleotide. An a-anomeric oligonucleotide forms specific double-stranded hybrids with complementary RNA in which, contrary to the usual b-units, the strands run parallel to each other (Gautier et al., 1987, Nucl. Acids Res. 15:6625-6641). The oligonucleotide is a 2′-0-methylribonucleotide (Inoue et al., 1987, Nucl. Acids Res. 15:6131-6148), or a chimeric RNA-DNA analogue (Inoue et al., 1987, FEBS Lett. 215:327-330).

[0734] Polynucleotides of the invention may be synthesized by standard methods known in the art, e.g. by use of an automated DNA synthesizer (such as are commercially available from Biosearch, Applied Biosystems, etc.). As examples, phosphorothioate oligonucleotides may be synthesized by the method of Stein et al. (1988, Nucl. Acids Res. 16:3209), methylphosphonate oligonucleotides can be prepared by use of controlled pore glass polymer supports (Sarin et al., 1988, Proc. Natl. Acad. Sci. U.S.A. 85:7448-7451), etc.

[0735] While antisense nucleotides complementary to the coding region sequence could be used, those complementary to the transcribed untranslated region are most preferred.

[0736] Potential antagonists according to the invention also include catalytic RNA, or a ribozyme (See, e.g., PCT International Publication WO 90/11364, published Oct. 4, 1990; Sarver et al, Science 247:1222-1225 (1990). While ribozymes that cleave mRNA at site specific recognition sequences can be used to destroy mRNAs, the use of hammerhead ribozyrnes is preferred. Hammerhead ribozymes cleave mRNAs at locations dictated by flanking regions that form complementary base pairs with the target mRNA. The sole requirement is that the target mRNA have the following sequence of two bases: 5′-UG-3′. The construction and production of hammerhead ribozymes is well known in the art and is described more fully in Haseloff and Gerlach, Nature 334:585-591 (1988). There are numerous potential hammerhead ribozyme cleavage sites within the nucleotide sequence of SEQ ID NO:X. Preferably, the ribozyme is engineered so that the cleavage recognition site is located near the 5′ end of the mRNA; i.e., to increase efficiency and minimize the intracellular accumulation of non-functional mRNA transcripts.

[0737] As in the antisense approach, the ribozymes of the invention can be composed of modified oligonucleotides (e.g., for improved stability, targeting, etc.) and should be delivered to cells which express in vivo. DNA constructs encoding the ribozyme may be introduced into the cell in the same manner as described above for the introduction of antisense encoding DNA. A preferred method of delivery involves using a DNA construct “encoding” the ribozyme under the control of a strong constitutive promoter, such as, for example, pol III or pol II promoter, so that transfected cells will produce sufficient quantities of the ribozyme to destroy endogenous messages and inhibit translation. Since ribozymes unlike antisense molecules, are catalytic, a lower intracellular concentration is required for efficiency.

[0738] Antagonist/agonist compounds may be employed to inhibit the cell growth and proliferation effects of the polypeptides of the present invention on neoplastic cells and tissues, i.e. stimulation of angiogenesis of tumors, and, therefore, retard or prevent abnormal cellular growth and proliferation, for example, in tumor formation or growth.

[0739] The antagonist/agonist may also be employed to prevent hyper-vascular diseases, and prevent the proliferation of epithelial lens cells after extracapsular cataract surgery. Prevention of the mitogenic activity of the polypeptides of the present invention may also be desirous in cases such as restenosis after balloon angioplasty.

[0740] The antagonist/agonist may also be employed to prevent the growth of scar tissue during wound healing.

[0741] The antagonist/agonist may also be employed to treat the diseases described herein.

[0742] Thus, the invention provides a method of treating disorders or diseases, including but not limited to the disorders or diseases listed throughout this application, associated with overexpression of a polynucleotide of the present invention by administering to a patient (a) an antisense molecule directed to the polynucleotide of the present invention, and/or (b) a ribozyme directed to the polynucleotide of the present invention.

### Binding Peptides and Other Molecules

[0743] The invention also encompasses screening methods for identifying polypeptides and nonpolypeptides that bind polypeptides of the invention, and the binding molecules identified thereby. These binding molecules are useful, for example, as agonists and antagonists of the polypeptides of the invention. Such agonists and antagonists can be used, in accordance with the invention, in the therapeutic embodiments described in detail, below.

[0744] This method comprises the steps of:

[0745] a. contacting polypeptides of the invention with a plurality of molecules; and

[0746] b. identifying a molecule that binds the polypeptides of the invention.

[0747] The step of contacting the polypeptides of the invention with the plurality of molecules may be effected in a number of ways. For example, one may contemplate immobilizing the polypeptides on a solid support and bringing a solution of the plurality of molecules in contact with the immobilized polypeptides. Such a procedure would be akin to an affinity chromatographic process, with the affinity matrix being comprised of the immobilized polypeptides of the invention. The molecules having a selective affinity for the polypeptides can then be purified by affinity selection. The nature of the solid support, process for attachment of the polypeptides to the solid support, solvent, and conditions of the affinity isolation or selection are largely conventional and well known to those of ordinary skill in the art.

[0748] Alternatively, one may also separate a plurality of polypeptides into substantially separate fractions comprising a subset of or individual polypeptides. For instance, one can separate the plurality of polypeptides by gel electrophoresis, column chromatography, or like method known to those of ordinary skill for the separation of polypeptides. The individual polypeptides can also be produced by a transformed host cell in such a way as to be expressed on or about its outer surface (e.g., a recombinant phage). Individual isolates can then be “probed” by the polypeptides of the invention, optionally in the presence of an inducer should one be required for expression, to determine if any selective affinity interaction takes place between the polypeptides and the individual clone. Prior to contacting the polypeptides with each fraction comprising individual polypeptides, the polypeptides could first be transferred to a solid support for additional convenience. Such a solid support may simply be a piece of filter membrane, such as one made of nitrocellulose or nylon. In this manner, positive clones could be identified from a collection of transformed host cells of an expression library, which harbor a DNA construct encoding a polypeptide having a selective affinity for polypeptides of the invention. Furthermore, the amino acid sequence of the polypeptide having a selective affinity for the polypeptides of the invention can be determined directly by conventional means or the coding sequence of the DNA encoding the polypeptide can frequently be determined more conveniently. The primary sequence can then be deduced from the corresponding DNA sequence. If the amino acid sequence is to be determined from the polypeptide itself, one may use microsequencing techniques. The sequencing technique may include mass spectroscopy.

[0749] In certain situations, it may be desirable to wash away any unbound polypeptides from a mixture of the polypeptides of the invention and the plurality of polypeptides prior to attempting to determine or to detect the presence of a selective affinity interaction. Such a wash step may be particularly desirable when the polypeptides of the invention or the plurality of polypeptides are bound to a solid support.

[0750] The plurality of molecules provided according to this method may be provided by way of diversity libraries, such as random or combinatorial peptide or nonpeptide libraries which can be screened for molecules that specifically bind polypeptides of the invention. Many libraries are known in the art that can be used, e.g., chemically synthesized libraries, recombinant (e.g., phage display libraries), and in vitro translation-based libraries. Examples of chemically synthesized libraries are described in Fodor et al., 1991, Science 251:767-773; Houghten et al., 1991, Nature 354:84-86; Lam et al., 1991, Nature 354:82-84; Medynski, 1994, Bio/Technology 12:709-710;Gallop et al., 1994, J. Medicinal Chemistry 37(9):1233-1251; Ohlmeyer et al., 1993, Proc. Natl. Acad. Sci. USA 90:10922-10926; Erb et al., 1994, Proc. Natl. Acad. Sci. USA 91:11422-11426; Houghten et al., 1992, Biotechniques 13:412; Jayawickreme et al., 1994, Proc. Natl. Acad. Sci. USA 91:1614-1618; Salmon et al., 1993, Proc. Natl. Acad. Sci. USA 90:11708-11712; PCT Publication No. WO 93/20242; and Brenner and Lemer, 1992, Proc. Natl. Acad. Sci. USA 89:5381-5383.

[0751] Examples of phage display libraries are described in Scott and Smith, 1990, Science 249:386-390; Devlin et al., 1990, Science, 249:404-406; Christian, R. B., et al., 1992, J. Mol. Biol. 227:711-718); Lenstra, 1992, J. Immunol. Meth. 152:149-157; Kay et al., 1993, Gene 128:59-65; and PCT Publication No. WO 94/18318 dated Aug. 18, 1994.

[0752] In vitro translation-based libraries include but are not limited to those described in PCT Publication No. WO 91/05058 dated Apr. 18, 1991; and Mattheakis et al., 1994, Proc. Natl. Acad. Sci. USA 91:9022-9026.

[0753] By way of examples of nonpeptide libraries, a benzodiazepine library (see e.g., Bunin et al., 1994, Proc. Natl. Acad. Sci. USA 91:4708-4712) can be adapted for use. Peptoid libraries (Simon et al., 1992, Proc. Natl. Acad. Sci. USA 89:9367-9371) can also be used. Another example of a library that can be used, in which the amide functionalities in peptides have been permethylated to generate a chemically transformed combinatorial library, is described by Ostresh et al. (1994, Proc. Natl. Acad. Sci. USA 91:11138-11142).

[0754] The variety of non-peptide libraries that are useful in the present invention is great. For example, Ecker and Crooke, 1995, Bio/Technology 13:351-360 list benzodiazepines, hydantoins, piperazinediones, biphenyls, sugar analogs, beta-mercaptoketones, arylacetic acids, acylpiperidines, benzopyrans, cubanes, xanthines, aminimides, and oxazolones as among the chemical species that form the basis of various libraries.

[0755] Non-peptide libraries can be classified broadly into two types: decorated monomers and oligomers. Decorated monomer libraries employ a relatively simple scaffold structure upon which a variety functional groups is added. Often the scaffold will be a molecule with a known useful pharmacological activity. For example, the scaffold might be the benzodiazepine structure.

[0756] Non-peptide oligomer libraries utilize a large number of monomers that are assembled together in ways that create new shapes that depend on the order of the monomers. Among the monomer units that have been used are carbamates, pyrrolinones, and morpholinos. Peptoids, peptide-like oligomers in which the side chain is attached to the alpha amino group rather than the alpha carbon, form the basis of another version of non-peptide oligomer libraries. The first non-peptide oligomer libraries utilized a single type of monomer and thus contained a repeating backbone. Recent libraries have utilized more than one monomer, giving the libraries added flexibility.

[0757] Screening the libraries can be accomplished by any of a variety of commonly known methods. See, e.g., the following references, which disclose screening of peptide libraries: Parmley and Smith, 1989, Adv. Exp. Med. Biol. 251:215-218; Scott and Smith, 1990, Science 249:386-390; Fowlkes et al., 1992; BioTechniques 13:422-427; Oldenburg et al., 1992, Proc. Natl. Acad. Sci. USA 89:5393-5397; Yu et al., 1994, Cell 76:933-945; Staudt et al., 1988, Science 241:577-580; Bock et al., 1992, Nature 355:564-566; Tuerk et al., 1992, Proc. Natl. Acad. Sci. USA 89:6988-6992; Ellington et al., 1992, Nature 355:850-852; U.S. Pat. No. 5,096,815, U.S. Pat. No. 5,223,409, and U.S. Pat. No. 5,198,346, all to Ladner et al.; Rebar and Pabo, 1993, Science 263:671-673; and CT Publication No. WO 94/18318.

[0758] In a specific embodiment, screening to identify a molecule that binds polypeptides of the invention can be carried out by contacting the library members with polypeptides of the invention immobilized on a solid phase and harvesting those library members that bind to the polypeptides of the invention. Examples of such screening methods, termed “panning” techniques are described by way of example in Parmley and Smith, 1988, Gene 73:305-318; Fowlkes et al., 1992, BioTechniques 13:422-427; PCT Publication No. WO 94/18318; and in references cited herein.

[0759] In another embodiment, the two-hybrid system for selecting interacting proteins in yeast (Fields and Song, 1989, Nature 340:245-246; Chien et al., 1991, Proc. Natl. Acad. Sci. USA 88:9578-9582) can be used to identify molecules that specifically bind to polypeptides of the invention.

[0760] Where the binding molecule is a polypeptide, the polypeptide can be conveniently selected from any peptide library, including random peptide libraries, combinatorial peptide libraries, or biased peptide libraries. The term “biased” is used herein to mean that the method of generating the library is manipulated so as to restrict one or more parameters that govern the diversity of the resulting collection of molecules, in this case peptides.

[0761] Thus, a truly random peptide library would generate a collection of peptides in which the probability of finding a particular amino acid at a given position of the peptide is the same for all 20 amino acids. A bias can be introduced into the library, however, by specifying, for example, that a lysine occur every fifth amino acid or that positions 4, 8, and 9 of a decapeptide library be fixed to include only arginine. Clearly, many types of biases can be contemplated, and the present invention is not restricted to any particular bias. Furthermore, the present invention contemplates specific types of peptide libraries, such as phage displayed peptide libraries and those that utilize a DNA construct comprising a lambda phage vector with a DNA insert.

[0762] As mentioned above, in the case of a binding molecule that is a polypeptide, the polypeptide may have about 6 to less than about 60 amino acid residues, preferably about 6 to about 10 amino acid residues, and most preferably, about 6 to about 22 amino acids. In another embodiment, a binding polypeptide has in the range of 15-100 amino acids, or 20-50 amino acids.

[0763] The selected binding polypeptide can be obtained by chemical synthesis or recombinant expression.

### Other Activities

[0764] A polypeptide, polynucleotide, agonist, or antagonist of the present invention, as a result of the ability to stimulate vascular endothelial cell growth, may be employed in treatment for stimulating re-vascularization of ischemic tissues due to various disease conditions such as thrombosis, arteriosclerosis, and other cardiovascular conditions. The polypeptide, polynucleotide, agonist, or antagonist of the present invention may also be employed to stimulate angiogenesis and limb regeneration, as discussed above.

[0765] A polypeptide, polynucleotide, agonist, or antagonist of the present invention may also be employed for treating wounds due to injuries, burns, post-operative tissue repair, and ulcers since they are mitogenic to various cells of different origins, such as fibroblast cells and skeletal muscle cells, and therefore, facilitate the repair or replacement of damaged or diseased tissue.

[0766] A polypeptide, polynucleotide, agonist, or antagonist of the present invention may also be employed stimulate neuronal growth and to treat and prevent neuronal damage which occurs in certain neuronal disorders or neuro-degenerative conditions such as Alzheimer's disease, Parkinson's disease, and AIDS-related complex. A polypeptide, polynucleotide, agonist, or antagonist of the present invention may have the ability to stimulate chondrocyte growth, therefore, they may be employed to enhance bone and periodontal regeneration and aid in tissue transplants or bone grafts.

[0767] A polypeptide, polynucleotide, agonist, or antagonist of the present invention may be also be employed to prevent skin aging due to sunburn by stimulating keratinocyte growth.

[0768] A polypeptide, polynucleotide, agonist, or antagonist of the present invention may also be employed for preventing hair loss, since FGF family members activate hair-forming cells and promotes melanocyte growth. Along the same lines, a polypeptide, polynucleotide, agonist, or antagonist of the present invention may be employed to stimulate growth and differentiation of hematopoietic cells and bone marrow cells when used in combination with other cytokines.

[0769] A polypeptide, polynucleotide, agonist, or antagonist of the present invention may also be employed to maintain organs before transplantation or for supporting cell culture of primary tissues. A polypeptide, polynucleotide, agonist, or antagonist of the present invention may also be employed for inducing tissue of mesodermal origin to differentiate in early embryos.

[0770] A polypeptide, polynucleotide, agonist, or antagonist of the present invention may also increase or decrease the differentiation or proliferation of embryonic stem cells, besides, as discussed above, hematopoietic lineage.

[0771] A polypeptide, polynucleotide, agonist, or antagonist of the present invention may also be used to modulate mammalian characteristics, such as body height, weight, hair color, eye color, skin, percentage of adipose tissue, pigmentation, size, and shape (e.g., cosmetic surgery). Similarly, a polypeptide, polynucleotide, agonist, or antagonist of the present invention may be used to modulate mammalian metabolism affecting catabolism, anabolism, processing, utilization, and storage of energy.

[0772] A polypeptide, polynucleotide, agonist, or antagonist of the present invention may be used to change a mammal's mental state or physical state by influencing biorhythms, caricadic rhythms, depression (including depressive disorders), tendency for violence, tolerance for pain, reproductive capabilities (preferably by Activin or Inhibin-like activity), hormonal or endocrine levels, appetite, libido, memory, stress, or other cognitive qualities.

[0773] A polypeptide, polynucleotide, agonist, or antagonist of the present invention may also be used as a food additive or preservative, such as to increase or decrease storage capabilities, fat content, lipid, protein, carbohydrate, vitamins, minerals, cofactors or other nutritional components.

[0774] The above-recited applications have uses in a wide variety of hosts. Such hosts include, but are not limited to, human, murine, rabbit, goat, guinea pig, camel, horse, mouse, rat, hamster, pig, micro-pig, chicken, goat, cow, sheep, dog, cat, non-human primate, and human. In specific embodiments, the host is a mouse, rabbit, goat, guinea pig, chicken, rat, hamster, pig, sheep, dog or cat. In preferred embodiments, the host is a mammal. In most preferred embodiments, the host is a human.

### Other Preferred Embodiments

[0775] Other preferred embodiments of the claimed invention include an isolated nucleic acid molecule comprising a nucleotide sequence which is at least 95% identical to a sequence of at least about 50 contiguous nucleotides in the nucleotide sequence of SEQ ID NO:X or the complementary strand thereto, the nucleotide sequence as defined in column 5 of Table 1A or columns 8 and 9 of Table 2 or the complementary strand thereto, and/or cDNA contained in Clone ID NO:Z.

[0776] Also preferred is a nucleic acid molecule wherein said sequence of contiguous nucleotides is included in the nucleotide sequence of the portion of SEQ ID NO:X as defined in column 5,“ORF (From-To)”, in Table 1A.

[0777] Also preferred is a nucleic acid molecule wherein said sequence of contiguous nucleotides is included in the nucleotide sequence of the portion of SEQ ID NO:X as defined in columns 8 and 9,“NT From” and “NT To” respectively, in Table 2.

[0778] Also preferred is an isolated nucleic acid molecule comprising a nucleotide sequence which is at least 95% identical to a sequence of at least about 150 contiguous nucleotides in the nucleotide sequence of SEQ ID) NO:X or the complementary strand thereto, the nucleotide sequence as defined in column 5 of Table 1A or columns 8 and 9 of Table 2 or the complementary strand thereto, and/or cDNA contained in Clone ID NO:Z.

[0779] Further preferred is an isolated nucleic acid molecule comprising a nucleotide sequence which is at least 95% identical to a sequence of at least about 500 contiguous nucleotides in the nucleotide sequence of SEQ ID NO:X or the complementary strand thereto, the nucleotide sequence as defined in column 5 of Table 1A or columns 8 and 9 of Table 2 or the complementary strand thereto, and/or cDNA contained in Clone ID NO:Z.

[0780] A further preferred embodiment is a nucleic acid molecule comprising a nucleotide sequence which is at least 95% identical to the nucleotide sequence of the portion of SEQ ID NO:X defined in column 5, “ORF (From-To)”, in Table 1A.

[0781] A further preferred embodiment is a nucleic acid molecule comprising a nucleotide sequence which is at least 95% identical to the nucleotide sequence of the portion of SEQ ID NO:X defined in columns 8 and 9, “NT From” and “NT To”, respectively, in Table 2.

[0782] A further preferred embodiment is an isolated nucleic acid molecule comprising a nucleotide sequence which is at least 95% identical to the complete nucleotide sequence of SEQ ID NO:X or the complementary strand thereto, the nucleotide sequence as defined in column 5 of Table 1A or columns 8 and 9 of Table 2 or the complementary strand thereto, and/or cDNA contained in Clone ID NO:Z.

[0783] Also preferred is an isolated nucleic acid molecule which hybridizes under stringent hybridization conditions to a nucleic acid molecule comprising a nucleotide sequence of SEQ ID NO:X or the complementary strand thereto, the nucleotide sequence as defined in column 5 of Table 1A or columns 8 and 9 of Table 2 or the complementary strand thereto, and/or cDNA contained in Clone ID NO:Z, wherein said nucleic acid molecule which hybridizes does not hybridize under stringent hybridization conditions to a nucleic acid molecule having a nucleotide sequence consisting of only A residues or of only T residues.

[0784] Also preferred is a composition of matter comprising a DNA molecule which comprises the cDNA contained in Clone ID NO:Z.

[0785] Also preferred is an isolated nucleic acid molecule comprising a nucleotide sequence which is at least 95% identical to a sequence of at least 50 contiguous nucleotides of the cDNA sequence contained in Clone ID NO:Z.

[0786] Also preferred is an isolated nucleic acid molecule, wherein said sequence of at least 50 contiguous nucleotides is included in the nucleotide sequence of an open reading frame sequence encoded by cDNA contained in Clone ID NO:Z.

[0787] Also preferred is an isolated nucleic acid molecule comprising a nucleotide sequence which is at least 95% identical to sequence of at least 150 contiguous nucleotides in the nucleotide sequence encoded by cDNA contained in Clone ID NO:Z.

[0788] A further preferred embodiment is an isolated nucleic acid molecule comprising a nucleotide sequence which is at least 95% identical to sequence of at least 500 contiguous nucleotides in the nucleotide sequence encoded by cDNA contained in Clone ID NO:Z.

[0789] A further preferred embodiment is an isolated nucleic acid molecule comprising a nucleotide sequence which is at least 95% identical to the complete nucleotide sequence encoded by cDNA contained in Clone ID NO:Z.

[0790] A further preferred embodiment is a method for detecting in a biological sample a nucleic acid molecule comprising a nucleotide sequence which is at least 95% identical to a sequence of at least 50 contiguous nucleotides in a sequence selected from the group consisting of: a nucleotide sequence of SEQ ID NO:X or the complementary strand thereto; the nucleotide sequence as defined in column 5 of Table 1A or columns 8 and 9 of Table 2 or the complementary strand thereto; and a nucleotide sequence encoded by cDNA contained in Clone ID NO:Z; which method comprises a step of comparing a nucleotide sequence of at least one nucleic acid molecule in said sample with a sequence selected from said group and determining whether the sequence of said nucleic acid molecule in said sample is at least 95% identical to said selected sequence.

[0791] Also preferred is the above method wherein said step of comparing sequences comprises determining the extent of nucleic acid hybridization between nucleic acid molecules in said sample and a nucleic acid molecule comprising said sequence selected from said group. Similarly, also preferred is the above method wherein said step of comparing sequences is performed by comparing the nucleotide sequence determined from a nucleic acid molecule in said sample with said sequence selected from said group. The nucleic acid molecules can comprise DNA molecules or RNA molecules.

[0792] A further preferred embodiment is a method for identifying the species, tissue or cell type of a biological sample which method comprises a step of detecting nucleic acid molecules in said sample, if any, comprising a nucleotide sequence that is at least 95% identical to a sequence of at least 50 contiguous nucleotides in a sequence selected from the group consisting of: a nucleotide sequence of SEQ ID NO:X or the complementary strand thereto; the nucleotide sequence as defined in column 5 of Table 1A or columns 8 and 9 of Table 2 or the complementary strand thereto; and a nucleotide sequence of the cDNA contained in Clone ID NO:Z.

[0793] The method for identifying the species, tissue or cell type of a biological sample can comprise a step of detecting nucleic acid molecules comprising a nucleotide sequence in a panel of at least two nucleotide sequences, wherein at least one sequence in said panel is at least 95% identical to a sequence of at least 50 contiguous nucleotides in a sequence selected from said group.

[0794] Also preferred is a method for diagnosing in a subject a pathological condition associated with abnormal structure or expression of a nucleotide sequence of SEQ ID NO:X or the complementary strand thereto; the nucleotide sequence as defined in column 5 of Table 1A or columns 8 and 9 of Table 2 or the complementary strand thereto; or the cDNA contained in Clone ID NO:Z which encodes a protein, wherein the method comprises a step of detecting in a biological sample obtained from said subject nucleic acid molecules, if any, comprising a nucleotide sequence that is at least 95% identical to a sequence of at least 50 contiguous nucleotides in a sequence selected from the group consisting of: a nucleotide sequence of SEQ ID NO:X or the complementary strand thereto; the nucleotide sequence as defined in column 5 of Table 1A or columns 8 and 9 of Table 2 or the complementary strand thereto; and a nucleotide sequence of cDNA contained in Clone ID NO:Z.

[0795] The method for diagnosing a pathological condition can comprise a step of detecting nucleic acid molecules comprising a nucleotide sequence in a panel of at least two nucleotide sequences, wherein at least one sequence in said panel is at least 95% identical to a sequence of at least 50 contiguous nucleotides in a sequence selected from said group.

[0796] Also preferred is a composition of matter comprising isolated nucleic acid molecules wherein the nucleotide sequences of said nucleic acid molecules comprise a panel of at least two nucleotide sequences, wherein at least one sequence in said panel is at least 95% identical to a sequence of at least 50 contiguous nucleotides in a sequence selected from the group consisting of: a nucleotide sequence of SEQ ID NO:X or the complementary strand thereto; the nucleotide sequence as defined in column 5 of Table 1A or columns 8 and 9 of Table 2 or the complementary strand thereto; and a nucleotide sequence encoded by cDNA contained in Clone ID NO:Z. The nucleic acid molecules can comprise DNA molecules or RNA molecules.

[0797] Also preferred is a composition of matter comprising isolated nucleic acid molecules wherein the nucleotide sequences of said nucleic acid molecules comprise a DNA microarray or “chip” of at least 1, 2, 3, 4, 5, 6, 7, 8, 9, 10, 15, 20, 25, 30, 40, 50, 100, 150, 200, 250, 300, 500, 1000, 2000, 3000, or 4000 nucleotide sequences, wherein at least one sequence in said DNA microarray or “chip” is at least 95% identical to a sequence of at least 50 contiguous nucleotides in a sequence selected from the group consisting of: a nucleotide sequence of SEQ ID NO:X wherein X is any integer as defined in Table 1A; and a nucleotide sequence encoded by a human cDNA clone identified by a cDNA “Clone ID” in Table 1A.

[0798] Also preferred is an isolated polypeptide comprising an amino acid sequence at least 90% identical to a sequence of at least about 10 contiguous amino acids in the polypeptide sequence of SEQ ID NO:Y; a polypeptide encoded by SEQ ID NO:X or the complementary strand thereto; the polypeptide encoded by the nucleotide sequence as defined in columns 8 and 9 of Table 2; and/or a polypeptide encoded by cDNA contained in Clone ID NO:Z.

[0799] Also preferred is an isolated polypeptide comprising an amino acid sequence at least 95% identical to a sequence of at least about 30 contiguous amino acids in the amino acid sequence of SEQ ID NO:Y; a polypeptide encoded by SEQ ID NO:X or the complementary strand thereto; the polypeptide encoded by the nucleotide sequence as defined in columns 8 and 9 of Table 2; and/or a polypeptide encoded by cDNA contained in Clone ID NO:Z.

[0800] Further preferred is an isolated polypeptide comprising an amino acid sequence at least 95% identical to a sequence of at least about 100 contiguous amino acids in the amino acid sequence of SEQ ID NO:Y; a polypeptide encoded by SEQ ID NO:X or the complementary strand thereto; the polypeptide encoded by the nucleotide sequence as defined in columns 8 and 9 of Table 2; and/or a polypeptide encoded by cDNA contained in Clone ID NO:Z.

[0801] Further preferred is an isolated polypeptide comprising an amino acid sequence at least 95% identical to the complete amino acid sequence of SEQ ID NO:Y; a polypeptide encoded by SEQ ID NO:X or the complementary strand thereto; the polypeptide encoded by the nucleotide sequence as defined in columns 8 and 9 of Table 2; and/or a polypeptide encoded by cDNA contained in Clone ID NO:Z.

[0802] Further preferred is an isolated polypeptide comprising an amino acid sequence at least 90% identical to a sequence of at least about 10 contiguous amino acids in the complete amino acid sequence of a polypeptide encoded by contained in Clone ID NO:Z

[0803] Also preferred is a polypeptide wherein said sequence of contiguous amino acids is included in the amino acid sequence of a portion of said polypeptide encoded by cDNA contained in Clone ID NO:Z; a polypeptide encoded by SEQ ID NO:X or the complementary strand thereto; the polypeptide encoded by the nucleotide sequence as defined in columns 8 and 9 of Table 2; and/or the polypeptide sequence of SEQ ID NO:Y.

[0804] Also preferred is an isolated polypeptide comprising an amino acid sequence at least 95% identical to a sequence of at least about 30 contiguous amino acids in the amino acid sequence of a polypeptide encoded by the cDNA contained in Clone ID NO:Z.

[0805] Also preferred is an isolated polypeptide comprising an amino acid sequence at least 95% identical to a sequence of at least about 100 contiguous amino acids in the amino acid sequence of a polypeptide encoded by cDNA contained in Clone ID NO:Z.

[0806] Also preferred is an isolated polypeptide comprising an amino acid sequence at least 95% identical to the amino acid sequence of a polypeptide encoded by the cDNA contained in Clone ID NO:Z.

[0807] Further preferred is an isolated antibody which binds specifically to a polypeptide comprising an amino acid sequence that is at least 90% identical to a sequence of at least 10 contiguous amino acids in a sequence selected from the group consisting of: a polypeptide sequence of SEQ ID NO:Y; a polypeptide encoded by SEQ ID NO:X or the complementary strand thereto; the polypeptide encoded by the nucleotide sequence as defined in columns 8 and 9 of Table 2; and a polypeptide encoded by the cDNA contained in Clone ID NO:Z.

[0808] Further preferred is a method for detecting in a biological sample a polypeptide comprising an amino acid sequence which is at least 90% identical to a sequence of at least 10 contiguous amino acids in a sequence selected from the group consisting of: a polypeptide sequence of SEQ ID NO:Y; a polypeptide encoded by SEQ ID NO:X or the complementary strand thereto; the polypeptide encoded by the nucleotide sequence as defined in columns 8 and 9 of Table 2; and a polypeptide encoded by the cDNA contained in Clone ID NO:Z; which method comprises a step of comparing an amino acid sequence of at least one polypeptide molecule in said sample with a sequence selected from said group and determining whether the sequence of said polypeptide molecule in said sample is at least 90% identical to said sequence of at least 10 contiguous amino acids.

[0809] Also preferred is the above method wherein said step of comparing an amino acid sequence of at least one polypeptide molecule in said sample with a sequence selected from said group comprises determining the extent of specific binding of polypeptides in said sample to an antibody which binds specifically to a polypeptide comprising an amino acid sequence that is at least 90% identical to a sequence of at least 10 contiguous amino acids in a sequence selected from the group consisting of: a polypeptide sequence of SEQ ID NO:Y; a polypeptide encoded by SEQ ID NO:X or the complementary strand thereto; the polypeptide encoded by the nucleotide sequence as defined in columns 8 and 9 of Table 2; and a polypeptide encoded by the cDNA contained in Clone ID NO:Z.

[0810] Also preferred is the above method wherein said step of comparing sequences is performed by comparing the amino acid sequence determined from a polypeptide molecule in said sample with said sequence selected from said group.

[0811] Also preferred is a method for identifying the species, tissue or cell type of a biological sample which method comprises a step of detecting polypeptide molecules in said sample, if any, comprising an amino acid sequence that is at least 90% identical to a sequence of at least 10 contiguous amino acids in a sequence selected from the group consisting of: polypeptide sequence of SEQ ID NO:Y; a polypeptide encoded by SEQ ID NO:X or the complementary strand thereto; the polypeptide encoded by the nucleotide sequence as defined in columns 8 and 9 of Table 2; and a polypeptide encoded by the cDNA contained in Clone ID NO:Z.

[0812] Also preferred is the above method for identifying the species, tissue or cell type of a biological sample, which method comprises a step of detecting polypeptide molecules comprising an amino acid sequence in a panel of at least two amino acid sequences, wherein at least one sequence in said panel is at least 90% identical to a sequence of at least 10 contiguous amino acids in a sequence selected from the above group.

[0813] Also preferred is a method for diagnosing in a subject a pathological condition associated with abnormal structure or expression of a nucleic acid sequence identified in Table 1A or Table 2 encoding a polypeptide, which method comprises a step of detecting in a biological sample obtained from said subject polypeptide molecules comprising an amino acid sequence in a panel of at least two amino acid sequences, wherein at least one sequence in said panel is at least 90% identical to a sequence of at least 10 contiguous amino acids in a sequence selected from the group consisting of: polypeptide sequence of SEQ ID NO:Y; a polypeptide encoded by SEQ ID NO:X or the complementary strand thereto; the polypeptide encoded by the nucleotide sequence as defined in columns 8 and 9 of Table 2; and a polypeptide encoded by the cDNA contained in Clone ID NO:Z.

[0814] In any of these methods, the step of detecting said polypeptide molecules includes using an antibody.

[0815] Also preferred is an isolated nucleic acid molecule comprising a nucleotide sequence which is-at least 95% identical to a nucleotide sequence encoding a polypeptide wherein said polypeptide comprises an amino acid sequence that is at least 90% identical to a sequence of at least 10 contiguous amino acids in a sequence selected from the group consisting of: polypeptide sequence of SEQ ID NO:Y; a polypeptide encoded by SEQ ID NO:X or the complementary strand thereto; the polypeptide encoded by the nucleotide sequence as defined in columns 8 and 9 of Table 2; and a polypeptide encoded by the cDNA contained in Clone ID NO:Z.

[0816] Also preferred is an isolated nucleic acid molecule, wherein said nucleotide sequence encoding a polypeptide has been optimized for expression of said polypeptide in a prokaryotic host.

[0817] Also preferred is a polypeptide molecule, wherein said polypeptide comprises an amino acid sequence selected from the group consisting of: polypeptide sequence of SEQ ID NO:Y; a polypeptide encoded by SEQ ID NO:X or the complementary strand thereto; the polypeptide encoded by the nucleotide sequence as defined in columns 8 and 9 of Table 2; and a polypeptide encoded by the cDNA contained in Clone ID NO:Z.

[0818] Further preferred is a method of making a recombinant vector comprising inserting any of the above isolated nucleic acid molecule into a vector. Also preferred is the recombinant vector produced by this method. Also preferred is a method of making a recombinant host cell comprising introducing the vector into a host cell, as well as the recombinant host cell produced by this method.

[0819] Also preferred is a method of making an isolated polypeptide comprising culturing this recombinant host cell under conditions such that said polypeptide is expressed and recovering said polypeptide. Also preferred is this method of making an isolated polypeptide, wherein said recombinant host cell is a eukaryotic cell and said polypeptide is a human protein comprising an amino acid sequence selected from the group consisting of: polypeptide sequence of SEQ ID NO:Y; a polypeptide encoded by SEQ ID NO:X or the complementary strand thereto; the polypeptide encoded by the nucleotide sequence as defined in columns 8 and 9 of Table 2; and a polypeptide encoded by the cDNA contained in Clone ID NO:Z. The isolated polypeptide produced by this method is also preferred.

[0820] Also preferred is a method of treatment of an individual in need of an increased level of a protein activity, which method comprises administering to such an individual a Therapeutic comprising an amount of an isolated polypeptide, polynucleotide, immunogenic fragment or analogue thereof, binding agent, antibody, or antigen binding fragment of the claimed invention effective to increase the level of said protein activity in said individual.

[0821] Also preferred is a method of treatment of an individual in need of a decreased level of a protein activity, which method comprised administering to such an individual a Therapeutic comprising an amount of an isolated polypeptide, polynucleotide, immunogenic fragment or analogue thereof, binding agent, antibody, or antigen binding fragment of the claimed invention effective to decrease the level of said protein activity in said individual.

[0822] Also preferred is a method of treatment of an individual in need of a specific delivery of toxic compositions to diseased cells (e.g., tumors, leukemias or lymphomas), which method comprises administering to such an individual a Therapeutic comprising an amount of an isolated polypeptide of the invention, including, but not limited to a binding agent, or antibody of the claimed invention that are associated with toxin or cytotoxic prodrugs.

[0823] Having generally described the invention, the same will be more readily understood by reference to the following examples, which are provided by way of illustration and are not intended as limiting.

TABLE 6

| ATCC Deposits | Deposit Date | ATCC Designation Number |
|---|---|---|
| LP01, LP02, LP03, | May 20, 1997 | 209059, 209060, 209061, 209062, |
| LP04, LP05, LP06, | | 209063, 209064, 209065, 209066, |
| LP07, LP08, LP09, | | 209067, 209068, 209069 |
| LP10, LP11, | | |
| LP12 | Jan. 12, 1998 | 209579 |
| LP13 | Jan. 12, 1998 | 209578 |
| LP14 | Jul. 16, 1998 | 203067 |
| LP15 | Jul. 16, 1998 | 203068 |
| LP16 | Feb. 1, 1999 | 203609 |
| LP17 | Feb. 1, 1999 | 203610 |
| LP20 | Nov. 17, 1998 | 203485 |
| LP21 | Jun. 18, 1999 | PTA-252 |
| LP22 | Jun. 18, 1999 | PTA-253 |
| LP23 | Dec. 22, 1999 | PTA-1081 |

### EXAMPLES

### EXAMPLE 1

### Isolation of a Selected cDNA Clone From the Deposited Sample

[0824] Each Clone ID NO:Z is contained in a plasmid vector. Table 7 identifies the vectors used to construct the cDNA library from which each clone was isolated. In many cases, the vector used to construct the library is a phage vector from which a plasmid has been excised. The following correlates the related plasmid for each phage vector used in constructing the cDNA library. For example, where a particular clone is identified in Table 7 as being isolated in the vector “Lambda Zap,” the corresponding deposited clone is in “pBluescript.”

| Vector Used to Construct Library | Corresponding Deposited Plasmid |
|---|---|
| Lambda Zap | pBluescript (pBS) |
| Uni-Zap XR | pBluescript (pBS) |
| Zap Express | pBK |
| lafmid BA | plafmid BA |
| pSport1 | pSport1 |
| pCMVSport 2.0 | pCMVSport 2.0 |
| pCMVSport 3.0 | pCMVSport 3.0 |
| pCR ® 2.1 | pCR ® 2.1 |

[0825] Vectors Lambda Zap (U.S. Pat. Nos. 5,128,256 and 5,286,636), Uni-Zap XR (U.S. Pat. Nos. 5,128, 256 and 5,286,636), Zap Express (U.S. Pat. Nos. 5,128,256 and 5,286,636), pBluescript (pBS) (Short, J. M. et al., Nucleic Acids Res. 16:7583-7600 (1988); Alting-Mees, M. A. and Short, J. M., Nucleic Acids Res. 17:9494 (1989)) and pBK (Alting-Mees, M. A. et al., Strategies 5:58-61 (1992)) are commercially available from Stratgene Cloning Systems, Inc., 11011 N. Torrey Pines Road, La Jolla, Calif., 92037. pBS contains an ampicillin resistance gene and pBK contains a neomycin resistance gene. Both can be transformed into E. coli strain XL-1 Blue, also available from Stratagene. pBS comes in 4 forms SK+, SK−, KS+and KS. The S and K refers to the orientation of the polylinker to the T7 and T3 primer sequences which flank the polylinker region (“S” is for SacI and “K” is for KpnI which are the first sites on each respective end of the linker). “+” or “−” refer to the orientation of the fl origin of replication (“ori”), such that in one orientation, single stranded rescue initiated from the fl ori generates sense strand DNA and in the other, antisense.

[0826] Vectors pSport1, pCMVSport 2.0 and pCMVSport 3.0, were obtained from Life Technologies, Inc., P. O. Box 6009, Gaithersburg, Md. 20897. All Sport vectors contain an ampicillin resistance gene and may be transformed into E. coli strain DH10B, also available from Life Technologies. (See, for instance, Gruber, C. E., et al., Focus 15:59 (1993)). Vector lafmid BA (Bento Soares, Columbia University, NY) contains an ampicillin resistance gene and can be transformed into E. coli strain XL-1 Blue. Vector pCR®2.1, which is available from Invitrogen, 1600 Faraday Avenue, Carlsbad, Calif. 92008, contains an ampicillin resistance gene and may be transformed into E. coli strain DH10B, available from Life Technologies. (See, for instance, Clark, J. M., Nuc. Acids Res. 16:9677-9686 (1988) and Mead, D. et al., Bio/Technology 9:(1991)). Preferably, a polynucleotide of the present invention does not comprise the phage vector sequences identified for the particular clone in Table 7, as well as the corresponding plasmid vector sequences designated above.

[0827] The deposited material in the sample assigned the ATCC Deposit Number cited by reference to Tables 1, 2, 6 and 7 for any given cDNA clone also may contain one or more additional plasmids, each comprising a cDNA clone different from that given clone. Thus, deposits sharing the same ATCC Deposit Number contain at least a plasmid for each Clone ID NO:Z.

TABLE 7

| | | | ATCC |
|---|---|---|---|
| Libraries owned by Catalog | Catalog Description | Vector | Deposit |
| HUKA HUKB HUKC HUKD | Human Uterine Cancer | Lambda ZAP II | LP01 |
| HUKE HUKF HUKG | | | |
| HCNA HCNB | Human Colon | Lambda Zap II | LP01 |
| HFFA | Human Fetal Brain, random primed | Lambda Zap II | LP01 |
| HTWA | Resting T-Cell | Lambda ZAP II | LP01 |
| HBQA | Early Stage Human Brain, random | Lambda ZAP II | LP01 |
| | primed | | |
| HLMB HLMF HLMG HLMH HLMI | breast lymph node CDNA library | Lambda ZAP II | LP01 |
| HLMJ HLMM HLMN | | | |
| HCQA HCQB | human colon cancer | Lamda ZAP II | LP01 |
| HMEA HMEC HMED HMEE | Human Microvascular Endothelial | Lambda ZAP II | LP01 |
| HMEF HMEG HMEI HMEJ HMEK | Cells, fract. A | | |
| HMEL | | | |
| HUSA HUSC | Human Umbilical Vein Endothelial | Lambda ZAP II | LP01 |
| | Cells, fract. A | | |
| HLQA HLQB | Hepatocellular Tumor | Lambda ZAP II | LP01 |
| HHGA HHGB HHGC HHGD | Hemangiopericytoma | Lambda ZAP II | LP01 |
| HSDM | Human Striatum Depression, re-rescue | Lambda ZAP II | LP01 |
| HUSH | H Umbilical Vein Endothelial Cells, frac | Lambda ZAP II | LP01 |
| | A, re-excision | | |
| HSGS | Salivary gland, subtracted | Lambda ZAP II | LP01 |
| HFXA HFXB HFXC HFXD HFXE | Brain frontal cortex | Lambda ZAP II | LP01 |
| HFXF HFXG HFXH | | | |
| HPQA HPQB HPQC | PERM TF274 | Lambda ZAP II | LP01 |
| HFXJ HFXK | Brain Frontal Cortex, re-excision | Lambda ZAP II | LP01 |
| HCWA HCWB HCWC HCWD | CD34 positive cells (Cord Blood) | ZAP Express | LP02 |
| HCWE HCWF HCWG HCWH | | | |
| HCWI HCWJ HCWK | | | |
| HCUA HCUB HCUC | CD34 depleted Buffy Coat (Cord Blood) | ZAP Express | LP02 |
| HRSM | A-14 cell line | ZAP Express | LP02 |
| HRSA | A1-CELL LINE | ZAP Express | LP02 |
| HCUD HCUE HCUF HCUG HCUH | CD34 depleted Buffy Coat (Cord Blood), | ZAP Express | LP02 |
| HCUI | re-excision | | |
| HBXE HBXF HBXG | H. Whole Brain #2, re-excision | ZAP Express | LP02 |
| HRLM | L8 cell line | ZAP Express | LP02 |
| HBXA HBXB HBXC HBXD | Human Whole Brain #2 - Oligo dT > | ZAP Express | LP02 |
| | 1.5 Kb | | |
| HUDA HUDB HUDC | Testes | ZAP Express | LP02 |
| HHTM HHTN HHTO | H. hypothalamus, frac A; re-excision | ZAP Express | LP02 |
| HHTL | H. hypothalamus, frac A | ZAP Express | LP02 |
| HASA HASD | Human Adult Spleen | Uni-ZAP XR | LP03 |
| HFKC HFKD HFKE HFKF HFKG | Human Fetal Kidney | Uni-ZAP XR | LP03 |
| HE8A HE8B HE8C HE8D HE8E | Human 8 Week Whole Embryo | Uni-ZAP XR | LP03 |
| HE8F HE8M HE8N | | | |
| HGBA HGBD HGBE HGBF HGBG | Human Gall Bladder | Uni-ZAP XR | LP03 |
| HGBH HGBI | | | |
| HLHA HLHB HLHC HLHD HLHE | Human Fetal Lung III | Uni-ZAP XR | LP03 |
| HLHF HLHG HLHH HLHQ | | | |
| HPMA HPMB HPMC HPMD | Human Placenta | Uni-ZAP XR | LP03 |
| HPME HPMF HPMG HPMH | | | |
| HPRA HPRB HPRC HPRD | Human Prostate | Uni-ZAP XR | LP03 |
| HSIA HSIC HSID HSIE | Human Adult Small Intestine | Uni-ZAP XR | LP03 |
| HTEA HTEB HTEC HTED HTEE | Human Testes | Uni-ZAP XR | LP03 |
| HTEF HTEG HTEH HTEI HTEJ | | | |
| HTEK | | | |
| HTPA HTPB HTPC HTPD HTPE | Human Pancreas Tumor | Uni-ZAP XR | LP03 |
| HTTA HTTB HTTC HTTD HTTE | Human Testes Tumor | Uni-ZAP XR | LP03 |
| HTTF | | | |
| HAPA HAPB HAPC HAPM | Human Adult Pulmonary | Uni-ZAP XR | LP03 |
| HETA HETB HETC HETD HETE | Human Endometrial Tumor | Uni-ZAP XR | LP03 |
| HETF HETG HETH HETI | | | |
| HHFB HHFC HHFD HHFE HHFF | Human Fetal Heart | Uni-ZAP XR | LP03 |
| HHFG HHFH HHFI | | | |
| HHPB HHPC HHPD HHPE HHPF | Human Hippocampus | Uni-ZAP XR | LP03 |
| HHPG HHPH | | | |
| HCE1 HCE2 HCE3 HCE4 HCE5 | Human Cerebellum | Uni-ZAP XR | LP03 |
| HCEB HCEC HCED HCEE HCEF | | | |
| HCEG | | | |
| HUVB HUVC HUVD HUVE | Human Umbilical Vein, Endo. remake | Uni-ZAP XR | LP03 |
| HSTA HSTB HSTC HSTD | Human Skin Tumor | Uni-ZAP XR | LP03 |
| HTAA HTAB HTAC HTAD HTAE | Human Activated T-Cells | Uni-ZAP XR | LP03 |
| HFEA HFEB HFEC | Human Fetal Epithelium (Skin) | Uni-ZAP XR | LP03 |
| HJPA HJPB HJPC HJPD | HUMAN JURKAT MEMBRANE | Uni-ZAP XR | LP03 |
| | BOUND POLYSOMES | | |
| HESA | Human epithelioid sarcoma | Uni-Zap XR | LP03 |
| HLTA HLTB HLTC HLTD HLTE | Human T-Cell Lymphoma | Uni-ZAP XR | LP03 |
| HLTF | | | |
| HFTA HFTB HFTC HFTD | Human Fetal Dura Mater | Uni-ZAP XR | LP03 |
| HRDA HRDB HRDC HRDD HRDE | Human Rhabdomyosarcoma | Uni-ZAP XR | LP03 |
| HRDF | | | |
| HCAA HCAB HCAC | Cem cells cyclohexamide treated | Uni-ZAP XR | LP03 |
| HRGA HRGB HRGC HRGD | Raji Cells, cyclohexamide treated | Uni-ZAP XR | LP03 |
| HSUA HSUB HSUC HSUM | Supt Cells, cyclohexamide treated | Uni-ZAP XR | LP03 |
| HT4A HT4C HT4D | Activated T-Cells, 12 hrs. | Uni-ZAP XR | LP03 |
| HE9A HE9B HE9C HE9D HE9E | Nine Week Old Early Stage Human | Uni-ZAP XR | LP03 |
| HE9F HE9G HE9H HE9M HE9N | | | |
| HATA HATB HATC HATD HATE | Human Adrenal Gland Tumor | Uni-ZAP XR | LP03 |
| HT5A | Activated T-Cells, 24 hrs. | Uni-ZAP XR | LP03 |
| HFGA HFGM | Human Fetal Brain | Uni-ZAP XR | LP03 |
| HNEA HNEB HNEC HNED HNEE | Human Neutrophil | Uni-ZAP XR | LP03 |
| HBGB HBGD | Human Primary Breast Cancer | Uni-ZAP XR | LP03 |
| HBNA HBNB | Human Normal Breast | Uni-ZAP XR | LP03 |
| HCAS | Cem Cells, cyclohexamide treated, subtra | Uni-ZAP XR | LP03 |
| HHPS | Human Hippocampus, subtracted | pBS | LP03 |
| HKCS HKCU | Human Colon Cancer, subtracted | pBS | LP03 |
| HRGS | Raji cells, cyclohexamide treated, | pBS | LP03 |
| | subtracted | | |
| HSUT | Supt cells, cyclohexamide treated, | pBS | LP03 |
| | differentially expressed | | |
| HT4S | Activated T-Cells, 12 hrs, subtracted | Uni-ZAP XR | LP03 |
| HCDA HCDB HCDC HCDD HCDE | Human Chondrosarcoma | Uni-ZAP XR | LP03 |
| HOAA HOAB HOAC | Human Osteosarcoma | Uni-ZAP XR | LP03 |
| HTLA HTLB HTLC HTLD HTLE | Human adult testis, large inserts | Uni-ZAP XR | LP03 |
| HTLF | | | |
| HLMA HLMC HLMD | Breast Lymph node cDNA library | Uni-ZAP XR | LP03 |
| H6EA H6EB H6EC | HL-60, PMA 4H | Uni-ZAP XR | LP03 |
| HTXA HTXB HTXC HTXD HTXE | Activated T-Cell (12hs)/Thiouridine | Uni-ZAP XR | LP03 |
| HTXF HTXG HTXH | labelledEco | | |
| HNFA HNFB HNFC HNFD HNFE | Human Neutrophil, Activated | Uni-ZAP XR | LP03 |
| HNFF HNFG HNFH HNFJ | | | |
| HTOB HTOC | HUMAN TONSILS, FRACTION 2 | Uni-ZAP XR | LP03 |
| HMGB | Human OB MG63 control fraction I | Uni-ZAP XR | LP03 |
| HOPB | Human OB HOS control fraction I | Uni-ZAP XR | LP03 |
| HORB | Human OB HOS treated (10 nM E2) | Uni-ZAP XR | LP03 |
| | fraction I | | |
| HSVA HSVB HSVC | Human Chronic Synovitis | Uni-ZAP XR | LP03 |
| HROA | HUMAN STOMACH | Uni-ZAP XR | LP03 |
| HBJA HBJB HBJC HBJD HBJE | HUMAN B CELL LYMPHOMA | Uni-ZAP XR | LP03 |
| HBJF HBJG HBJH HBJI HBJJ | | | |
| HBJK | | | |
| HCRA HCRB HCRC | human corpus colosum | Uni-ZAP XR | LP03 |
| HODA HODB HODC HODD | human ovarian cancer | Uni-ZAP XR | LP03 |
| HDSA | Dermatofibrosarcoma Protuberance | Uni-ZAP XR | LP03 |
| HMWA HMWB HMWC HMWD | Bone Marrow Cell Line (RS4; 11) | Uni-ZAP XR | LP03 |
| HMWE HMWF HMWG HMWH | | | |
| HMWI HMWJ | | | |
| HSOA | stomach cancer (human) | Uni-ZAP XR | LP03 |
| HERA | SKIN | Uni-ZAP XR | LP03 |
| HMDA | Brain-medulloblastoma | Uni-ZAP XR | LP03 |
| HGLA HGLB HGLD | Glioblastoma | Uni-ZAP XR | LP03 |
| HEAA | H. Atrophic Endometrium | Uni-ZAP XR | LP03 |
| HBCA HBCB | H. Lymph node breast Cancer | Uni-ZAP XR | LP03 |
| HPWT | Human Prostate BPH, re-excision | Uni-ZAP XR | LP03 |
| HFVG HFVH HFVI | Fetal Liver, subtraction II | pBS | LP03 |
| HNFI | Human Neutrophils, Activated, re- | pBS | LP03 |
| | excision | | |
| HBMB HBMC HBMD | Human Bone Marrow, re-excision | pBS | LP03 |
| HKML HKMM HKMN | H. Kidney Medulla, re-excision | pBS | LP03 |
| HKIX HKIY | H. Kidney Cortex, subtracted | pBS | LP03 |
| HADT | H. Amygdala Depression, subtracted | pBS | LP03 |
| H6AS | Hl-60, untreated, subtracted | Uni-ZAP XR | LP03 |
| H6ES | HL-60, PMA 4H, subtracted | Uni-ZAP XR | LP03 |
| H6BS | HL-60, RA 4 h, Subtracted | Uni-ZAP XR | LP03 |
| H6CS | HL-60, PMA 1 d, subtracted | Uni-ZAP XR | LP03 |
| HTXJ HTXK | Activated T-cell(12 h)/Thiouridine-re- | Uni-ZAP XR | LP03 |
| | excision | | |
| HMSA HMSB HMSC HMSD | Monocyte activated | Uni-ZAP XR | LP03 |
| HMSE HMSF HMSG HMSH HMSI | | | |
| HMSJ HMSK | | | |
| HAGA HAGB HAGC HAGD | Human Amygdala | Uni-ZAP XR | LP03 |
| HAGE HAGF | | | |
| HSRA HSRB HSRE | STROMAL-OSTEOCLASTOMA | Uni-ZAP XR | LP03 |
| HSRD HSRF HSRG HSRH | Human Osteoclastoma Stromal Cells - | Uni-ZAP XR | LP03 |
| | unamplified | | |
| HSQA HSQB HSQC HSQD HSQE | Stromal cell TF274 | Uni-ZAP XR | LP03 |
| HSQF HSQG | | | |
| HSKA HSKB HSKC HSKD HSKE | Smooth muscle, serum treated | Uni-ZAP XR | LP03 |
| HSKF HSKZ | | | |
| HSLA HSLB HSLC HSLD HSLE | Smooth muscle, control | Uni-ZAP XR | LP03 |
| HSLF HSLG | | | |
| HSDA HSDD HSDE HSDF HSDG | Spinal cord | Uni-ZAP XR | LP03 |
| HSDH | | | |
| HPWS | Prostate-BPH subtracted II | pBS | LP03 |
| HSKW HSKX HSKY | Smooth Muscle- HASTE normalized | pBS | LP03 |
| HFPB HFPC HFPD | H. Frontal cortex, epileptic; re-excision | Uni-ZAP XR | LP03 |
| HSDI HSDJ HSDK | Spinal Cord, re-excision | Uni-ZAP XR | LP03 |
| HSKN HSKO | Smooth Muscle Serum Treated, Norm | pBS | LP03 |
| HSKG HSKH HSKI | Smooth muscle, serum induced, re-exc | pBS | LP03 |
| HFCA HFCB HFCC HFCD HFCE | Human Fetal Brain | Uni-ZAP XR | LP04 |
| HFCF | | | |
| HPTA HPTB HPTD | Human Pituitary | Uni-ZAP XR | LP04 |
| HTHB HTHC HTHD | Human Thymus | Uni-ZAP XR | LP04 |
| HE6B HE6C HE6D HE6E HE6F | Human Whole Six Week Old Embryo | Uni-ZAP XR | LP04 |
| HE6G HE6S | | | |
| HSSA HSSB HSSC HSSD HSSE | Human Synovial Sarcoma | Uni-ZAP XR | LP04 |
| HSSF HSSG HSSH HSSI HSSJ | | | |
| HSSK | | | |
| HE7T | 7 Week Old Early Stage Human, | Uni-ZAP XR | LP04 |
| | subtracted | | |
| HEPA HEPB HEPC | Human Epididymus | Uni-ZAP XR | LP04 |
| HSNA HSNB HSNC HSNM HSNN | Human Synovium | Uni-ZAP XR | LP04 |
| HPFB HPFC HPFD HPFE | Human Prostate Cancer, Stage C fraction | Uni-ZAP XR | LP04 |
| HE2A HE2D HE2E HE2H HE2I | 12 Week Old Early Stage Human | Uni-ZAP XR | LP04 |
| HE2M HE2N HE2O | | | |
| HE2B HE2C HE2F HE2G HE2P | 12 Week Old Early Stage Human, II | Uni-ZAP XR | LP04 |
| HE2Q | | | |
| HPTS HPTT HPTU | Human Pituitary, subtracted | Uni-ZAP XR | LP04 |
| HAUA HAUB HAUC | Amniotic Cells - TNF induced | Uni-ZAP XR | LP04 |
| HAQA HAQB HAQC HAQD | Amniotic Cells - Primary Culture | Uni-ZAP XR | LP04 |
| HWTA HWTB HWTC | wilm's tumor | Uni-ZAP XR | LP04 |
| HBSD | Bone Cancer, re-excision | Uni-ZAP XR | LP04 |
| HSGB | Salivary gland, re-excision | Uni-ZAP XR | LP04 |
| HSJA HSJB HSJC | Smooth muscle-ILb induced | Uni-ZAP XR | LP04 |
| HSXA HSXB HSXC HSXD | Human Substantia Nigra | Uni-ZAP XR | LP04 |
| HSHA HSHB HSHC | Smooth muscle, IL1b induced | Uni-ZAP XR | LP04 |
| HOUA HOUB HOUC HOUD | Adipocytes | Uni-ZAP XR | LP04 |
| HOUE | | | |
| HPWA HPWB HPWC HPWD | Prostate BPH | Uni-ZAP XR | LP04 |
| HPWE | | | |
| HELA HELB HELC HELD HELE | Endothelial cells-control | Uni-ZAP XR | LP04 |
| HELF HELG HELH | | | |
| HEMA HEMB HEMC HEMD | Endothelial-induced | Uni-ZAP XR | LP04 |
| HEME HEMF HEMG HEMH | | | |
| HBIA HBIB HBIC | Human Brain, Striatum | Uni-ZAP XR | LP04 |
| HHSA HHSB HHSC HHSD HHSE | Human Hypothalmus, Schizophrenia | Uni-ZAP XR | LP04 |
| HNGA HNGB HNGC HNGD | neutrophils control | Uni-ZAP XR | LP04 |
| HNGE HNGF HNGG HNGH HNGI | | | |
| HNGJ | | | |
| HNHA HNHB HNHC HNHD | Neutrophils IL-1 and LPS induced | Uni-ZAP XR | LP04 |
| HNHE HNHF HNHG HNHH HNHI | | | |
| HNHJ | | | |
| HSDB HSDC | STRIATUM DEPRESSION | Uni-ZAP XR | LP04 |
| HHPT | Hypothalamus | Uni-ZAP XR | LP04 |
| HSAT HSAU HSAV HSAW HSAX | Anergic T-cell | Uni-ZAP XR | LP04 |
| HSAY HSAZ | | | |
| HBMS HBMT HBMU HBMV | Bone marrow | Uni-ZAP XR | LP04 |
| HBMW HBMX | | | |
| HOEA HOEB HOEC HOED HOEE | Osteoblasts | Uni-ZAP XR | LP04 |
| HOEF HOEJ | | | |
| HAIA HAIB HAIC HAID HAIE | Epithelial-TNFa and INF induced | Uni-ZAP XR | LP04 |
| HAIF | | | |
| HTGA HTGB HTGC HTGD | Apoptotic T-cell | Uni-ZAP XR | LP04 |
| HMCA HMCB HMCC HMCD | Macrophage-oxLDL | Uni-ZAP XR | LP04 |
| HMCE | | | |
| HMAA HMAB HMAC HMAD | Macrophage (GM-CSF treated) | Uni-ZAP XR | LP04 |
| HMAE HMAF HMAG | | | |
| HPHA | Normal Prostate | Uni-ZAP XR | LP04 |
| HPIA HPIB HPIC | LNCAP prostate cell line | Uni-ZAP XR | LP04 |
| HPJA HPJB HPJC | PC3 Prostate cell line | Uni-ZAP XR | LP04 |
| HOSE HOSF HOSG | Human Osteoclastoma, re-excision | Uni-ZAP XR | LP04 |
| HTGE HTGF | Apoptotic T-cell, re-excision | Uni-ZAP XR | LP04 |
| HMAJ HMAK | H Macrophage (GM-CSF treated), re- | Uni-ZAP XR | LP04 |
| | excision | | |
| HACB HACC HACD | Human Adipose Tissue, re-excision | Uni-ZAP XR | LP04 |
| HFPA | H. Frontal Cortex, Epileptic | Uni-ZAP XR | LP04 |
| HFAA HFAB HFAC HFAD HFAE | Alzheimer's, spongy change | Uni-ZAP XR | LP04 |
| HFAM | Frontal Lobe, Dementia | Uni-ZAP XR | LP04 |
| HMIA HMIB HMIC | Human Manic Depression Tissue | Uni-ZAP XR | LP04 |
| HTSA HTSE HTSF HTSG HTSH | Human Thymus | pBS | LP05 |
| HPBA HPBB HPBC HPBD HPBE | Human Pineal Gland | pBS | LP05 |
| HSAA HSAB HSAC | HSA 172 Cells | pBS | LP05 |
| HSBA HSBB HSBC HSBM | HSC172 cells | pBS | LP05 |
| HJAA HJAB HJAC HJAD | Jurkat T-cell G1 phase | pBS | LP05 |
| HJBA HJBB HJBC HJBD | Jurkat T-Cell, S phase | pBS | LP05 |
| HAFA HAFB | Aorta endothelial cells + TNF-a | pBS | LP05 |
| HAWA HAWB HAWC | Human White Adipose | pBS | LP05 |
| HTNA HTNB | Human Thyroid | pBS | LP05 |
| HONA | Normal Ovary, Premenopausal | pBS | LP05 |
| HARA HARB | Human Adult Retina | pBS | LP05 |
| HLJA HLJB | Human Lung | pCMVSport 1 | LP06 |
| HOFM HOFN HOFO | H. Ovarian Tumor, II, OV5232 | pCMVSport 2.0 | LP07 |
| HOGA HOGB HOGC | OV Oct. 3, 1995 | pCMVSport 2.0 | LP07 |
| HCGL | CD34 + cells, II | pCMVSport 2.0 | LP07 |
| HDLA | Hodgkin's Lymphoma I | pCMVSport 2.0 | LP07 |
| HDTA HDTB HDTC HDTD HDTE | Hodgkin's Lymphoma II | pCMVSport 2.0 | LP07 |
| HKAA HKAB HKAC HKAD | Keratinocyte | pCMVSport2.0 | LP07 |
| HKAE HKAF HKAG HKAH | | | |
| HCIM | CAPFINDER, Crohn's Disease, lib 2 | pCMVSport 2.0 | LP07 |
| HKAL | Keratinocyte, lib 2 | pCMVSport2.0 | LP07 |
| HKAT | Keratinocyte, lib 3 | pCMVSport2.0 | LP07 |
| HNDA | Nasal polyps | pCMVSport2.0 | LP07 |
| HDRA | H. Primary Dendritic Cells, lib 3 | pCMVSport2.0 | LP07 |
| HOHA HOHB HOHC | Human Osteoblasts II | pCMVSport2.0 | LP07 |
| HLDA HLDB HLDC | Liver, Hepatoma | pCMVSport3.0 | LP08 |
| HLDN HLDO HLDP | Human Liver, normal | pCMVSport3.0 | LP08 |
| HMTA | pBMC stimulated w/ poly I/C | pCMVSport3.0 | LP08 |
| HNTA | NTERA2, control | pCMVSport3.0 | LP08 |
| HDPA HDPB HDPC HDPD HDPF | Primary Dendritic Cells, lib 1 | pCMVSport3.0 | LP08 |
| HDPG HDPH HDPI HDPJ HDPK | | | |
| HDPM HDPN HDPO HDPP | Primary Dendritic cells, frac 2 | pCMVSport3.0 | LP08 |
| HMUA HMUB HMUC | Myoloid Progenitor Cell Line | pCMVSport3.0 | LP08 |
| HHEA HHEB HHEC HHED | T Cell helper I | pCMVSport3.0 | LP08 |
| HHEM HHEN HHEO HHEP | T cell helper II | pCMVSport3.0 | LP08 |
| HEQA HEQB HEQC | Human endometrial stromal cells | pCMVSport3.0 | LP08 |
| HJMA HJMB | Human endometrial stromal cells-treated | pCMVSport3.0 | LP08 |
| | with progesterone | | |
| HSWA HSWB HSWC | Human endometrial stromal cells-treated | pCMVSport3.0 | LP08 |
| | with estradiol | | |
| HSYA HSYB HSYC | Human Thymus Stromal Cells | pCMVSport3.0 | LP08 |
| HLWA HLWB HLWC | Human Placenta | pCMVSport3.0 | LP08 |
| HRAA HRAB HRAC | Rejected Kidney, lib 4 | pCMVSport3.0 | LP08 |
| HMTM | PCR, pBMC I/C treated | PCRII | LP09 |
| HMJA | H. Meniingima, M6 | pSport 1 | LP10 |
| HMKA HMKB HMKC HMKD | H. Meningima, M1 | pSport 1 | LP10 |
| HMKE | | | |
| HUSG HUSI | Human umbilical vein endothelial cells, | pSport 1 | LP10 |
| | IL-4 induced | | |
| HUSX HUSY | Human Umbilical Vein Endothelial | pSport 1 | LP10 |
| | Cells, uninduced | | |
| HOFA | Ovarian Tumor I, OV5232 | pSport 1 | LP10 |
| HCFA HCFB HCFC HCFD | T-Cell PHA 16 hrs | pSport 1 | LP10 |
| HCFL HCFM HCFN HCFO | T-Cell PHA 24 hrs | pSport 1 | LP10 |
| HADA HADC HADD HADE HADF | Human Adipose | pSport 1 | LP10 |
| HADG | | | |
| HOVA HOVB HOVC | Human Ovary | pSport 1 | LP10 |
| HTWB HTWC HTWD HTWE | Resting T-Cell Library, II | pSport 1 | LP10 |
| HTWF | | | |
| HMMA | Spleen metastic melanoma | pSport 1 | LP10 |
| HLYA HLYB HLYC HLYD HLYE | Spleen, Chronic lymphocytic leukemia | pSport 1 | LP10 |
| HCGA | CD34 + cell, I | pSport 1 | LP10 |
| HEOM HEON | Human Eosinophils | pSport 1 | LP10 |
| HTDA | Human Tonsil, Lib 3 | pSport 1 | LP10 |
| HSPA | Salivary Gland, Lib 2 | pSport 1 | LP10 |
| HCHA HCHB HCHC | Breast Cancer cell line, MDA 36 | pSport 1 | LP10 |
| HCHM HCHN | Breast Cancer Cell line, angiogenic | pSport 1 | LP10 |
| HCIA | Crohn's Disease | pSport 1 | LP10 |
| HDAA HDAB HDAC | HEL cell line | pSport 1 | LP10 |
| HABA | Human Astrocyte | pSport 1 | LP10 |
| HUFA HUFB HUFC | Ulcerative Colitis | pSport 1 | LP10 |
| HNTM | NTERA2 + retinoic acid, 14 days | pSport 1 | LP10 |
| HDQA | Primary Dendritic cells, CapFinder2, frac 1 | pSport 1 | LP10 |
| HDQM | Primary Dendritic Cells, CapFinder, frac 2 | pSport 1 | LP10 |
| HLDX | Human Liver, normal, CapFinder | pSport 1 | LP10 |
| HULA HULB HULC | Human Dermal Endothelial | pSport1 | LP10 |
| | Cells, untreated | | |
| HUMA | Human Dermal Endothelial cells, treated | pSport1 | LP10 |
| HCJA | Human Stromal Endometrial fibroblasts, | pSport1 | LP10 |
| | untreated | | |
| HCJM | Human Stromal endometrial fibroblasts, | pSport1 | LP10 |
| | treated w/ estradiol | | |
| HEDA | Human Stromal endometrial fibroblasts, | pSport1 | LP10 |
| | treated with progesterone | | |
| HFNA | Human ovary tumor cell OV350721 | pSport1 | LP10 |
| HKGA HKGB HKGC HKGD | Merkel Cells | pSport1 | LP10 |
| HISA HISB HISC | Pancreas Islet Cell Tumor | pSport1 | LP10 |
| HLSA | Skin, burned | pSport1 | LP10 |
| HBZA | Prostate, BPH, Lib 2 | pSport 1 | LP10 |
| HBZS | Prostate BPH, Lib 2, subtracted | pSport 1 | LP10 |
| HFIA HFIB HFIC | Synovial Fibroblasts (control) | pSport 1 | LP10 |
| HFIH HFII HFIJ | Synovial hypoxia | pSport 1 | LP10 |
| HFIT HFIU HFIV | Synovial IL-1/TNF stimulated | pSport 1 | LP10 |
| HGCA | Messangial cell, frac 1 | pSport1 | LP10 |
| HMVA HMVB HMVC | Bone Marrow Stromal Cell, untreated | pSport1 | LP10 |
| HFIX HFIY HFIZ | Synovial Fibroblasts (Il1/TNF), subt | pSport1 | LP10 |
| HFOX HFOY HFOZ | Synovial hypoxia-RSF subtracted | pSport1 | LP10 |
| HMQA HMQB HMQC HMQD | Human Activated Monocytes | Uni-ZAP XR | LP11 |
| HLIA HLIB HLIC | Human Liver | pCMVSport 1 | LP012 |
| HHBA HHBB HHBC HHBD HHBE | Human Heart | pCMVSport 1 | LP012 |
| HBBA HBBB | Human Brain | pCMVSport 1 | LP012 |
| HLJA HLJB HLJC HLJD HLJE | Human Lung | pCMVSport 1 | LP012 |
| HOGA HOGB HOGC | Ovarian Tumor | pCMVSport 2.0 | LP012 |
| HTJM | Human Tonsils, Lib 2 | pCMVSport 2.0 | LP012 |
| HAMF HAMG | KMH2 | pCMVSport 3.0 | LP012 |
| HAJA HAJB HAJC | L428 | pCMVSport 3.0 | LP012 |
| HWBA HWBB HWBC HWBD | Dendritic cells, pooled | pCMVSport 3.0 | LP012 |
| HWBE | | | |
| HWAA HWAB HWAC HWAD | Human Bone Marrow, treated | pCMVSport 3.0 | LP012 |
| HWAE | | | |
| HYAA HYAB HYAC | B Cell lymphoma | pCMVSport 3.0 | LP012 |
| HWHG HWHH HWHI | Healing groin wound, 6.5 hours post | pCMVSport 3.0 | LP012 |
| | incision | | |
| HWHP HWHQ HWHR | Healing groin wound; 7.5 hours post | pCMVSport 3.0 | LP012 |
| | incision | | |
| HARM | Healing groin wound - zero hr post- | pCMVSport 3.0 | LP012 |
| | incision (control) | | |
| HBIM | Olfactory epithelium; nasalcavity | pCMVSport 3.0 | LP012 |
| HWDA | Healing Abdomen wound; 70&90 min | pCMVSport 3.0 | LP012 |
| | post incision | | |
| HWEA | Healing Abdomen Wound; 15 days post | pCMVSport 3.0 | LP012 |
| | incision | | |
| HWJA | Healing Abdomen Wound; 21&29 days | pCMVSport 3.0 | LP012 |
| HNAL | Human Tongue, frac 2 | pSport1 | LP012 |
| HMJA | H. Meniingima, M6 | pSport1 | LP012 |
| HMKA HMKB HMKC HMKD | H. Meningima, M1 | pSport1 | LP012 |
| HMKE | | | |
| HOFA | Ovarian Tumor I, OV5232 | pSport1 | LP012 |
| HCFA HCFB HCFC HCFD | T-Cell PHA 16 hrs | pSport1 | LP012 |
| HCFL HCFM HCFN HCFO | T-Cell PHA 24 hrs | pSport1 | LP012 |
| HMMA HMMB HMMC | Spleen metastic melanoma | pSport1 | LP012 |
| HTDA | Human Tonsil, Lib 3 | pSport1 | LP012 |
| HDBA | Human Fetal Thymus | pSport1 | LP012 |
| HDUA | Pericardium | pSport1 | LP012 |
| HBZA | Prostate, BPH, Lib 2 | pSport1 | LP012 |
| HWCA | Larynx tumor | pSport1 | LP012 |
| HWKA | Normal lung | pSport1 | LP012 |
| HSMB | Bone marrow stroma, treated | pSport1 | LP012 |
| HBHM | Normal trachea | pSport1 | LP012 |
| HLFC | Human Larynx | pSport1 | LP012 |
| HLRB | Siebben Polyposis | pSport1 | LP012 |
| HNIA | Mammary Gland | pSport1 | LP012 |
| HNJB | Palate carcinoma | pSport1 | LP012 |
| HNKA | Palate normal | pSport1 | LP012 |
| HMZA | Pharynx carcinoma | pSport1 | LP012 |
| HABG | Cheek Carcinoma | pSport1 | LP012 |
| HMZM | Pharynx Carcinoma | pSport1 | LP012 |
| HDRM | Larynx Carcinoma | pSport1 | LP012 |
| HVAA | Pancreas normal PCA4 No | pSport1 | LP012 |
| HICA | Tongue carcinoma | pSport1 | LP012 |
| HUKA HUKB HUKC HUKD | Human Uterine Cancer | Lambda ZAP II | LP013 |
| HUKE | | | |
| HFFA | Human Fetal Brain, random primed | Lambda ZAP II | LP013 |
| HTUA | Activated T-cell labeled with 4-thioluri | Lambda ZAP II | LP013 |
| HBQA | Early Stage Human Brain, random | Lambda ZAP II | LP013 |
| | primed | | |
| HMEB | Human microvascular Endothelial cells, | Lambda ZAP II | LP013 |
| | fract. B | | |
| HUSH | Human Umbilical Vein Endothelial cells, | Lambda ZAP II | LP013 |
| | fract. A, re-excision | | |
| HLQC HLQD | Hepatocellular tumor, re-excision | Lambda ZAP II | LP013 |
| HTWJ HTWK HTWL | Resting T-cell, re-excision | Lambda ZAP II | LP013 |
| HF6S | Human Whole 6 week Old Embryo (II), | pBluescript | LP013 |
| | subt | | |
| HHPS | Human Hippocampus, subtracted | pBluescript | LP013 |
| HLIS | LNCAP, differential expression | pBluescript | LP013 |
| HLHS HLHT | Early Stage Human Lung, Subtracted | pBluescript | LP013 |
| HSUS | Supt cells, cyclohexamide treated, | pBluescript | LP013 |
| | subtracted | | |
| HSUT | Supt cells, cyclohexamide treated, | pBluescript | LP013 |
| | differentially expressed | | |
| HSDS | H. Striatum Depression, subtracted | pBluescript | LP013 |
| HPTZ | Human Pituitary, Subtracted VII | pBluescript | LP013 |
| HSDX | H. Striatum Depression, subt II | pBluescript | LP013 |
| HSDZ | H. Striatum Depression, subt | pBluescript | LP013 |
| HPBA HPBB HPBC HPBD HPBE | Human Pineal Gland | pBluescript SK- | LP013 |
| HRTA | Colorectal Tumor | pBluescript SK- | LP013 |
| HSBA HSBB HSBC HSBM | HSC172 cells | pBluescript SK- | LP013 |
| HJAA HJAB HJAC HJAD | Jurkat T-cell G1 phase | pBluescript SK- | LP013 |
| HJBA HJBB HJBC HJBD | Jurkat T-cell, S1 phase | pBluescript SK- | LP013 |
| HTNA HTNB | Human Thyroid | pBluescript SK- | LP013 |
| HAHA HAHB | Human Adult Heart | Uni-ZAP XR | LP013 |
| HE6A | Whole 6 week Old Embryo | Uni-ZAP XR | LP013 |
| HFCA HFCB HFCC HFCD HFCE | Human Fetal Brain | Uni-ZAP XR | LP013 |
| HFKC HFKD HFKE HFKF HFKG | Human Fetal Kidney | Uni-ZAP XR | LP013 |
| HGBA HGBD HGBE HGBF HGBG | Human Gall Bladder | Uni-ZAP XR | LP013 |
| HPRA HPRB HPRC HPRD | Human Prostate | Uni-ZAP XR | LP013 |
| HTEA HTEB HTEC HTED HTEE | Human Testes | Uni-ZAP XR | LP013 |
| HTTA HTTB HTTC HTTD HTTE | Human Testes Tumor | Uni-ZAP XR | LP013 |
| HYBA HYBB | Human Fetal Bone | Uni-ZAP XR | LP013 |
| HFLA | Human Fetal Liver | Uni-ZAP XR | LP013 |
| HHFB HHFC HHFD HHFE HHFF | Human Fetal Heart | Uni-ZAP XR | LP013 |
| HUVB HUVC HUVD HUVE | Human Umbilical Vein, End. remake | Uni-ZAP XR | LP013 |
| HTHB HTHC HTHD | Human Thymus | Uni-ZAP XR | LP013 |
| HSTA HSTB HSTC HSTD | Human Skin Tumor | Uni-ZAP XR | LP013 |
| HTAA HTAB HTAC HTAD HTAE | Human Activated T-cells | Uni-ZAP XR | LP013 |
| HFEA HFEB HFEC | Human Fetal Epithelium (skin) | Uni-ZAP XR | LP013 |
| HJPA HJPB HJPC HJPD | Human Jurkat Membrane Bound | Uni-ZAP XR | LP013 |
| | Polysomes | | |
| HESA | Human Epithelioid Sarcoma | Uni-ZAP XR | LP013 |
| HALS | Human Adult Liver, Subtracted | Uni-ZAP XR | LP013 |
| HFTA HFTB HFTC HFTD | Human Fetal Dura Mater | Uni-ZAP XR | LP013 |
| HCAA HCAB HCAC | Cem cells, cyclohexamide treated | Uni-ZAP XR | LP013 |
| HRGA HRGB HRGC HRGD | Raji Cells, cyclohexamide treated | Uni-ZAP XR | LP013 |
| HE9A HE9B HE9C HE9D HE9E | Nine Week Old Early Stage Human | Uni-ZAP XR | LP013 |
| HSFA | Human Fibrosarcoma | Uni-ZAP XR | LP013 |
| HATA HATB HATC HATD HATE | Human Adrenal Gland Tumor | Uni-ZAP XR | LP013 |
| HTRA | Human Trachea Tumor | Uni-ZAP XR | LP013 |
| HE2A HE2D HE2E HE2H HE2I | 12 Week Old Early Stage Human | Uni-ZAP XR | LP013 |
| HE2B HE2C HE2F HE2G HE2P | 12 Week Old Early Stage Human, II | Uni-ZAP XR | LP013 |
| HNEA HNEB HNEC HNED HNEE | Human Neutrophil | Uni-ZAP XR | LP013 |
| HBGA | Human Primary Breast Cancer | Uni-ZAP XR | LP013 |
| HPTS HPTT HPTU | Human Pituitary, subtracted | Uni-ZAP XR | LP013 |
| HMQA HMQB HMQC HMQD | Human Activated Monocytes | Uni-ZAP XR | LP013 |
| HOAA HOAB HOAC | Human Osteosarcoma | Uni-ZAP XR | LP013 |
| HTOA HTOD HTOE HTOF HTOG | human tonsils | Uni-ZAP XR | LP013 |
| HMGB | Human OB MG63 control fraction I | Uni-ZAP XR | LP013 |
| HOPB | Human OB HOS control fraction I | Uni-ZAP XR | LP013 |
| HOQB | Human OB HOS treated (1 nM E2) | Uni-ZAP XR | LP013 |
| | fraction I | | |
| HAUA HAUB HAUC | Amniotic Cells - TNF induced | Uni-ZAP XR | LP013 |
| HAQA HAQB HAQC HAQD | Amniotic Cells - Primary Culture | Uni-ZAP XR | LP013 |
| HROA HROC | HUMAN STOMACH | Uni-ZAP XR | LP013 |
| HBJA HBJB HBJC HBJD HBJE | HUMAN B CELL LYMPHOMA | Uni-ZAP XR | LP013 |
| HODA HODB HODC HODD | human ovarian cancer | Uni-ZAP XR | LP013 |
| HCPA | Corpus Callosum | Uni-ZAP XR | LP013 |
| HSOA | stomach cancer (human) | Uni-ZAP XR | LP013 |
| HERA | SKIN | Uni-ZAP XR | LP013 |
| HMDA | Brain-medulloblastoma | Uni-ZAP XR | LP013 |
| HGLA HGLB HGLD | Glioblastoma | Uni-ZAP XR | LP013 |
| HWTA HWTB HWTC | wilm's tumor | Uni-ZAP XR | LP013 |
| HEAA | H. Atrophic Endometrium | Uni-ZAP XR | LP013 |
| HAPN HAPO HAPP HAPQ HAPR | Human Adult Pulmonary; re-excision | Uni-ZAP XR | LP013 |
| HLTG HLTH | Human T-cell lymphoma; re-excision | Uni-ZAP XR | LP013 |
| HAHC HAHD HAHE | Human Adult Heart; re-excision | Uni-ZAP XR | LP013 |
| HAGA HAGB HAGC HAGD | Human Amygdala | Uni-ZAP XR | LP013 |
| HAGE | | | |
| HSJA HSJB HSJC | Smooth muscle-ILb induced | Uni-ZAP XR | LP013 |
| HSHA HSHB HSHC | Smooth muscle, IL1b induced | Uni-ZAP XR | LP013 |
| HPWA HPWB HPWC HPWD | Prostate BPH | Uni-ZAP XR | LP013 |
| HPWE | | | |
| HPIA HPIB HPIC | LNCAP prostate cell line | Uni-ZAP XR | LP013 |
| HPJA HPJB HPJC | PC3 Prostate cell line | Uni-ZAP XR | LP013 |
| HBTA | Bone Marrow Stroma, TNF&LPS ind | Uni-ZAP XR | LP013 |
| HMCF HMCG HMCH HMCI HMCJ | Macrophage-oxLDL; re-excision | Uni-ZAP XR | LP013 |
| HAGG HAGH HAGI | Human Amygdala; re-excision | Uni-ZAP XR | LP013 |
| HACA | H. Adipose Tissue | Uni-ZAP XR | LP013 |
| HKFB | K562 + PMA (36 hrs), re-excision | ZAP Express | LP013 |
| HCWT HCWU HCWV | CD34 positive cells (cord blood), re-ex | ZAP Express | LP013 |
| HBWA | Whole brain | ZAP Express | LP013 |
| HBXA HBXB HBXC HBXD | Human Whole Brain #2 - Oligo dT > | ZAP Express | LP013 |
| | 1.5 Kb | | |
| HAVM | Temporal cortex-Alzheizmer | pT-Adv | LP014 |
| HAVT | Hippocampus, Alzheimer Subtracted | pT-Adv | LP014 |
| HHAS | CHME Cell Line | Uni-ZAP XR | LP014 |
| HAJR | Larynx normal | pSport 1 | LP014 |
| HWLE HWLF HWLG HWLH | Colon Normal | pSport 1 | LP014 |
| HCRM HCRN HCRO | Colon Carcinoma | pSport 1 | LP014 |
| HWLI HWLJ HWLK | Colon Normal | pSport 1 | LP014 |
| HWLQ HWLR HWLS HWLT | Colon Tumor | pSport 1 | LP014 |
| HBFM | Gastrocnemius Muscle | pSport 1 | LP014 |
| HBOD HBOE | Quadriceps Muscle | pSport 1 | LP014 |
| HBKD HBKE | Soleus Muscle | pSport 1 | LP014 |
| HCCM | Pancreatic Langerhans | pSport 1 | LP014 |
| HWGA | Larynx carcinoma | pSport 1 | LP014 |
| HWGM HWGN | Larynx carcinoma | pSport 1 | LP014 |
| HWLA HWLB HWLC | Normal colon | pSport 1 | LP014 |
| HWLM HWLN | Colon Tumor | pSport 1 | LP014 |
| HVAM HVAN HVAO | Pancreas Tumor | pSport 1 | LP014 |
| HWGQ | Larynx carcinoma | pSport 1 | LP014 |
| HAQM HAQN | Salivary Gland | pSport 1 | LP014 |
| HASM | Stomach; normal | pSport 1 | LP014 |
| HBCM | Uterus; normal | pSport 1 | LP014 |
| HCDM | Testis; normal | pSport 1 | LP014 |
| HDJM | Brain; normal | pSport 1 | LP014 |
| HEFM | Adrenal Gland, normal | pSport 1 | LP014 |
| HBAA | Rectum normal | pSport 1 | LP014 |
| HFDM | Rectum tumour | pSport 1 | LP014 |
| HGAM | Colon, normal | pSport 1 | LP014 |
| HHMM | Colon, tumour | pSport 1 | LP014 |
| HCLB HCLC | Human Lung Cancer | Lambda Zap II | LP015 |
| HRLA | L1 Cell line | ZAP Express | LP015 |
| HHAM | Hypothalamus, Alzheimer's | pCMVSport 3.0 | LP015 |
| HKBA | Ku 812F Basophils Line | pSport 1 | LP015 |
| HS2S | Saos2, Dexamethosome Treated | pSport 1 | LP016 |
| HA5A | Lung Carcinoma A549 TNFalpha | pSport 1 | LP016 |
| | activated | | |
| HTFM | TF-1 Cell Line GM-CSF Treated | pSport 1 | LP016 |
| HYAS | Thyroid Tumour | pSport 1 | LP016 |
| HUTS | Larynx Normal | pSport 1 | LP016 |
| HXOA | Larynx Tumor | pSport 1 | LP016 |
| HEAH | Ea.hy.926 cell line | pSport 1 | LP016 |
| HINA | Adenocarcinoma Human | pSport 1 | LP016 |
| HRMA | Lung Mesothelium | pSport 1 | LP016 |
| HLCL | Human Pre-Differentiated Adipocytes | Uni-Zap XR | LP017 |
| HS2A | Saos2 Cells | pSport 1 | LP020 |
| HS2I | Saos2 Cells; Vitamin D3 Treated | pSport 1 | LP020 |
| HUCM | CHME Cell Line, untreated | pSport 1 | LP020 |
| HEPN | Aryepiglottis Normal | pSport 1 | LP020 |
| HPSN | Sinus Piniformis Tumour | pSport 1 | LP020 |
| HNSA | Stomach Normal | pSport 1 | LP020 |
| HNSM | Stomach Tumour | pSport 1 | LP020 |
| HNLA | Liver Normal Met5No | pSport 1 | LP020 |
| HUTA | Liver Tumour Met 5 Tu | pSport 1 | LP020 |
| HOCN | Colon Normal | pSport 1 | LP020 |
| HOCT | Colon Tumor | pSport 1 | LP020 |
| HTNT | Tongue Tumour | pSport 1 | LP020 |
| HLXN | Larynx Normal | pSport 1 | LP020 |
| HLXT | Larynx Tumour | pSport 1 | LP020 |
| HTYN | Thymus | pSport 1 | LP020 |
| HPLN | Placenta | pSport 1 | LP020 |
| HTNG | Tongue Normal | pSport 1 | LP020 |
| HZAA | Thyroid Normal (SDCA2 No) | pSport 1 | LP020 |
| HWES | Thyroid Thyroiditis | pSport 1 | LP020 |
| HFHD | Ficolled Human Stromal Cells, 5Fu | pTrip1Ex2 | LP021 |
| | treated | | |
| HFHM, HFHN | Ficolled Human Stromal Cells, Untreated | pTrip1Ex2 | LP021 |
| HPCI | Hep G2 Cells, lambda library | lambda Zap-CMV XR | LP021 |
| HBCA, HBCB, HBCC | H. Lymph node breast Cancer | Uni-ZAP XR | LP021 |
| HCOK | Chondrocytes | pSPORT1 | LP022 |
| HDCA, HDCB, HDCC | Dendritic Cells From CD34 Cells | pSPORT1 | LP022 |
| HDMA, HDMB | CD40 activated monocyte dendritic cells | pSPORT1 | LP022 |
| HDDM, HDDN, HDDO | LPS activated derived dendritic cells | pSPORT1 | LP022 |
| HPCR | Hep G2 Cells, PCR library | lambda Zap-CMV XR | LP022 |
| HAAA, HAAB, HAAC | Lung, Cancer (4005313A3): Invasive | pSPORT1 | LP022 |
| | Poorly Differentiated Lung | | |
| | Adenocarcinoma | | |
| HIPA, HIPB, HIPC | Lung, Cancer (4005163 B7): Invasive, | pSPORT1 | LP022 |
| | Poorly Diff. Adenocarcinoma, Metastatic | | |
| HOOH, HOOI | Ovary, Cancer: (4004562 B6) Papillary | pSPORT1 | LP022 |
| | Serous Cystic Neoplasm, Low Malignant | | |
| | Pot | | |
| HIDA | Lung, Normal: (4005313 B1) | pSPORT1 | LP022 |
| HUJA, HUJB, HUJC, HUJD, HUJE | B-Cells | pCMVSport 3.0 | LP022 |
| HNOA, HNOB, HNOC, HNOD | Ovary, Normal: (9805C040R) | pSPORT1 | LP022 |
| HNLM | Lung, Normal: (4005313 B1) | pSPORT1 | LP022 |
| HSCL | Stromal Cells | pSPORT1 | LP022 |
| HAAX | Lung, Cancer: (4005313 A3) Invasive | pSPORT1 | LP022 |
| | Poorly-differentiated Metastatic lung | | |
| | adenocarcinoma | | |
| HUUA, HUUB, HUUC, HUUD | B-cells (unstimulated) | pTrip1Ex2 | LP022 |
| HWWA, HWWB, HWWC, HWWD, H | B-cells (stimulated) | pSPORT1 | LP022 |
| WWE, HWWF, HWWG | | | |
| HCCC | Colon, Cancer: (9808C064R) | pCMVSport 3.0 | LP023 |
| HPDO HPDP HPDQ HPDR HPD | Ovary, Cancer (9809C332): Poorly | pSport 1 | LP023 |
| | differentiated adenocarcinoma | | |
| HPCO HPCP HPCQ HPCT | Ovary, Cancer (15395A1F): Grade II | pSport 1 | LP023 |
| | Papillary Carcinoma | | |
| HOCM HOCO HOCP HOCQ | Ovary, Cancer: (15799A1F) Poorly | pSport 1 | LP023 |
| | differentiated carcinoma | | |
| HCBM HCBN HCBO | Breast, Cancer: (4004943 A5) | pSport 1 | LP023 |
| HNBT HNBU HNBV | Breast, Normal: (4005522B2) | pSport 1 | LP023 |
| HBCP HBCQ | Breast, Cancer: (4005522 A2) | pSport 1 | LP023 |
| HBCJ | Breast, Cancer: (9806C012R) | pSport 1 | LP023 |
| HSAM HSAN | Stromal cells 3.88 | pSport 1 | LP023 |
| HVCA HVCB HVCC HVCD | Ovary, Cancer: (4004332 A2) | pSport 1 | LP023 |
| HSCK HSEN HSEO | Stromal cells (HBM3.18) | pSport 1 | LP023 |
| HSCP HSCQ | stromal cell clone 2.5 | pSport 1 | LP023 |
| HUXA | Breast Cancer: (4005385 A2) | pSport 1 | LP023 |
| HCOM HCON HCOO HCOP HCOQ | Ovary, Cancer (4004650 A3): Well- | pSport 1 | LP023 |
| | Differentiated Micropapillary Serous | | |
| | Carcinoma | | |
| HBNM | Breast, Cancer: (9802C020E) | pSport 1 | LP023 |
| HVVA HVVB HVVC HVVD | Human Bone Marrow, treated | pSport 1 | LP023 |
| HVVE | | | |

[0828] Two nonlimiting examples are provided below for isolating a particular clone from the deposited sample of plasmid cDNAs cited for that clone in Table 7. First, a plasmid is directly isolated by screening the clones using a polynucleotide probe corresponding to the nucleotide sequence of SEQ ID NO:X.

[0829] Particularly, a specific polynucleotide with 30-40 nucleotides is synthesized using an Applied Biosystems DNA synthesizer according to the sequence reported. The oligonucleotide is labeled, for instance, with ³²P-γ-ATP using T4 polynucleotide kinase and purified according to routine methods. (E.g., Maniatis et al., Molecular Cloning: A Laboratory Manual, Cold Spring Harbor Press, Cold Spring, NY (1982)). The plasmid mixture is transformed into a suitable host, as indicated above (such as XL-1 Blue (Stratagene)) using techniques known to those of skill in the art, such as those provided by the vector supplier or in related publications or patents cited above. The transformants are plated on 1.5% agar plates (containing the appropriate selection agent, e.g., ampicillin) to a density of about 150 transformants (colonies) per plate. These plates are screened using Nylon membranes according to routine methods for bacterial colony screening (e.g., Sambrook et al., Molecular Cloning: A Laboratory Manual, 2nd Edit., (1989), Cold Spring Harbor Laboratory Press, pages 1.93 to 1.104), or other techniques known to those of skill in the art.

[0830] Alternatively, two primers of 17-20 nucleotides derived from both ends of the nucleotide sequence of SEQ ID NO:X are synthesized and used to amplify the desired cDNA using the deposited cDNA plasmid as a template. The polymerase chain reaction is carried out under routine conditions, for instance, in 25 μl of reaction mixture with 0.5 ug of the above cDNA template. A convenient reaction mixture is 1.5-5 mM MgCl₂, 0.01% (w/v) gelatin, 20 μM each of dATP, dCTP, dGTP, dTTP, 25 pmol of each primer and 0.25 Unit of Taq polymerase. Thirty five cycles of PCR (denaturation at 94° C. for 1 min; annealing at 55° C. for 1 min; elongation at 72° C. for 1 min) are performed with a Perkin-Elmer Cetus automated thermal cycler. The amplified product is analyzed by agarose gel electrophoresis and the DNA band with expected molecular weight is excised and purified. The PCR product is verified to be the selected sequence by subcloning and sequencing the DNA product.

[0831] Several methods are available for the identification of the 5′ or 3′ non-coding portions of a gene which may not be present in the deposited clone. These methods include but are not limited to, filter probing, clone enrichment using specific probes, and protocols similar or identical to 5′ and 3′ “RACE” protocols which are well known in the art. For instance, a method similar to 5′ RACE is available for generating the missing 5′ end of a desired full-length transcript. (Fromont-Racine et al., Nucleic Acids Res. 21(7):1683-1684 (1993)).

[0832] Briefly, a specific RNA oligonucleotide is ligated to the 5′ ends of a population of RNA presumably containing full-length gene RNA transcripts. A primer set containing a primer specific to the ligated RNA oligonucleotide and a primer specific to a known sequence of the gene of interest is used to PCR amplify the 5′ portion of the desired full-length gene. This amplified product may then be sequenced and used to generate the full length gene.

[0833] This above method starts with total RNA isolated from the desired source, although poly-A+ RNA can be used. The RNA preparation can then be treated with phosphatase if necessary to eliminate 5′ phosphate groups on degraded or damaged RNA which may interfere with the later RNA ligase step. The phosphatase should then be inactivated and the RNA treated with tobacco acid pyrophosphatase in order to remove the cap structure present at the 5′ ends of messenger RNAs. This reaction leaves a 5′ phosphate group at the 5′ end of the cap cleaved RNA which can then be ligated to an RNA oligonucleotide using T4 RNA ligase.

[0834] This modified RNA preparation is used as a template for first strand cDNA synthesis using a gene specific oligonucleotide. The first strand synthesis reaction is used as a template for PCR amplification of the desired 5′ end using a primer specific to the ligated RNA oligonucleotide and a primer specific to the known sequence of the gene of interest. The resultant product is then sequenced and analyzed to confirm that the 5′ end sequence belongs to the desired gene.

### EXAMPLE 2

### Isolation of Genomic Clones Corresponding to a Polynucleotide

[0835] A human genomic P1 library (Genomic Systems, Inc.) is screened by PCR using primers selected for the sequence corresponding to SEQ ID NO:X according to the method described in Example 1. (See also, Sambrook.)

### EXAMPLE 3

### Tissue Specific Expression Analysis

[0836] The Human Genome Sciences, Inc. (HGS) database is derived from sequencing tissue and/or disease specific cDNA libraries. Libraries generated from a particular tissue are selected and the specific tissue expression pattern of EST groups or assembled contigs within these libraries is determined by comparison of the expression patterns of those groups or contigs within the entire database. ESTs and assembled contigs which show tissue specific expression are selected.

[0837] The original clone from which the specific EST sequence was generated, or in the case of an assembled contig, the clone from which the 5′ most EST sequence was generated, is obtained from the catalogued library of clones and the insert amplified by PCR using methods known in the art. The PCR product is denatured and then transferred in 96 or 384 well format to a nylon membrane (Schleicher and Scheull) generating an array filter of tissue specific clones. Housekeeping genes, maize genes, and known tissue specific genes are included on the filters. These targets can be used in signal normalization and to validate assay sensitivity. Additional targets are included to monitor probe length and specificity of hybridization.

[0838] Radioactively labeled hybridization probes are generated by first strand cDNA synthesis per the manufacturer's instructions (Life Technologies) from mRNA/RNA samples prepared from the specific tissue being analyzed (e.g., prostate, prostate cancer, ovarian, ovarian cancer, etc.). The hybridization probes are purified by gel exclusion chromatography, quantitated, and hybridized with the array filters in hybridization bottles at 65° C. overnight. The filters are washed under stringent conditions and signals are captured using a Fuji phosphorimager.

[0839] Data is extracted using AIS software and following background subtraction, signal normalization is performed. This includes a normalization of filter-wide expression levels between different experimental runs. Genes that are differentially expressed in the tissue of interest are identified.

### EXAMPLE 4

### Chromosomal Mapping of the Polynucleotides

[0840] An oligonucleotide primer set is designed according to the sequence at the 5′ end of SEQ ID NO:X. This primer preferably spans about 100 nucleotides. This primer set is then used in a polymerase chain reaction under the following set of conditions: 30 seconds, 95° C.; 1 minute, 56° C.; 1 minute, 70° C. This cycle is repeated 32 times followed by one 5 minute cycle at 70° C. Human, mouse, and hamster DNA is used as template in addition to a somatic cell hybrid panel containing individual chromosomes or chromosome fragments (Bios, Inc). The reactions are analyzed on either 8% polyacrylamide gels or 3.5% agarose gels. Chromosome mapping is determined by the presence of an approximately 100 bp PCR fragment in the particular somatic cell hybrid.

### EXAMPLE 5

### Bacterial Expression of a Polypeptide

[0841] A polynucleotide encoding a polypeptide of the present invention is amplified using PCR oligonucleotide primers corresponding to the 5′ and 3′ ends of the DNA sequence, as outlined in Example 1, to synthesize insertion fragments. The primers used to amplify the cDNA insert should preferably contain restriction sites, such as BamHI and XbaI, at the 5′ end of the primers in order to clone the amplified product into the expression vector. For example, BamHI and XbaI correspond to the restriction enzyme sites on the bacterial expression vector pQE-9. (Qiagen, Inc., Chatsworth, Calif.). This plasmid vector encodes antibiotic resistance (Amp^{r}), a bacterial origin of replication (ori), an IPTG-regulatable promoter/operator (P/O), a ribosome binding site (RBS), a 6-histidine tag (6-His), and restriction enzyme cloning sites.

[0842] The pQE-9 vector is digested with BamHI and XbaI and the amplified fragment is ligated into the pQE-9 vector maintaining the reading frame initiated at the bacterial RBS. The ligation mixture is then used to transform the E. coli strain M15/rep4 (Qiagen, Inc.) which contains multiple copies of the plasmid pREP4, which expresses the lacI repressor and also confers kanamycin resistance (Kan^{r}). Transformants are identified by their ability to grow on LB plates and ampicillin/kanamycin resistant colonies are selected. Plasmid DNA is isolated and confirmed by restriction analysis.

[0843] Clones containing the desired constructs are grown overnight (O/N) in liquid culture in LB media supplemented with both Amp (100 ug/ml) and Kan (25 ug/ml). The O/N culture is used to inoculate a large culture at a ratio of 1:100 to 1:250. The cells are grown to an optical density 600 (O.D.⁶⁰⁰) of between 0.4 and 0.6. IPTG (Isopropyl-B-D-thiogalacto pyranoside) is then added to a final concentration of 1 mM. IPTG induces by inactivating the lacI repressor, clearing the P/O leading to increased gene expression.

[0844] Cells are grown for an extra 3 to 4 hours. Cells are then harvested by centrifugation (20 mins at 6000 Xg). The cell pellet is solubilized in the chaotropic agent 6 Molar Guanidine HCl by stirring for 3-4 hours at 4° C. The cell debris is removed by centrifugation, and the supernatant containing the polypeptide is loaded onto a nickel-nitrilo-tri-acetic acid (“Ni—NTA”) affinity resin column (available from QIAGEN, Inc., supra). Proteins with a 6×His tag bind to the Ni—NTA resin with high affinity and can be purified in a simple one-step procedure (for details see: The QIAexpressionist (1995) QIAGEN, Inc., supra).

[0845] Briefly, the supernatant is loaded onto the column in 6 M guanidine-HCl, pH 8. The column is first washed with 10 volumes of 6 M guanidine-HCl, pH 8, then washed with 10 volumes of 6 M guanidine-HCl pH 6, and finally the polypeptide is eluted with 6 M guanidine-HCl, pH 5.

[0846] The purified protein is then renatured by dialyzing it against phosphate-buffered saline (PBS) or 50 mM Na-acetate, pH 6 buffer plus 200 mM NaCl. Alternatively, the protein can be successfully refolded while immobilized on the Ni—NTA column. The recommended conditions are as follows: renature using a linear 6M-1M urea gradient in 500 mM NaCl, 20% glycerol, 20 mM Tris/HCl pH 7.4, containing protease inhibitors. The renaturation should be performed over a period of 1.5 hours or more. After renaturation the proteins are eluted by the addition of 250 mM immidazole. Immidazole is removed by a final dialyzing step against PBS or 50 mM sodium acetate pH 6 buffer plus 200 mM NaCl. The purified protein is stored at 4° C. or frozen at −80° C.

[0847] In addition to the above expression vector, the present invention further includes an expression vector, called pHE4a (ATCC Accession Number 209645, deposited on Feb. 25, 1998) which contains phage operator and promoter elements operatively linked to a polynucleotide of the present invention, called pHBE4a. (ATCC Accession Number 209645, deposited on Feb. 25, 1998.) This vector contains: 1) a neomycinphosphotransferase gene as a selection marker, 2) an E. coli origin of replication, 3) a T5 phage promoter sequence, 4) two lac operator sequences, 5) a Shine-Delgarno sequence, and 6) the lactose operon repressor gene (lacIq). The origin of replication (oriC) is derived from pUC19 (LTI, Gaithersburg, Md.). The promoter and operator sequences are made synthetically.

[0848] DNA can be inserted into the pHE4a by restricting the vector with NdeI and XbaI, BamHI, XhoI, or Asp718, running the restricted product on a gel, and isolating the larger fragment (the stuffer fragment should be about 310 base pairs). The DNA insert is generated according to the PCR protocol described in Example 1, using PCR primers having restriction sites for NdeI (5′ primer) and XbaI, BamHI, XhoI, or Asp718 (3′ primer). The PCR insert is gel purified and restricted with compatible enzymes. The insert and vector are ligated according to standard protocols.

[0849] The engineered vector could easily be substituted in the above protocol to express protein in a bacterial system.

### EXAMPLE 6

### Purification of a Polypeptide from an Inclusion Body

[0850] The following alternative method can be used to purify a polypeptide expressed in E coli when it is present in the form of inclusion bodies. Unless otherwise specified, all of the following steps are conducted at 4-10° C.

[0851] Upon completion of the production phase of the E. coli fermentation, the cell culture is cooled to 4-10° C. and the cells harvested by continuous centrifugation at 15,000 rpm (Heraeus Sepatech). On the basis of the expected yield of protein per unit weight of cell paste and the amount of purified protein required, an appropriate amount of cell paste, by weight, is suspended in a buffer solution containing 100 mM Tris, 50 mM EDTA, pH 7.4. The cells are dispersed to a homogeneous suspension using a high shear mixer.

[0852] The cells are then lysed by passing the solution through a microfluidizer (Microfuidics, Corp. or APV Gaulin, Inc.) twice at 4000-6000 psi. The homogenate is then mixed with NaCl solution to a final concentration of 0.5 M NaCl, followed by centrifugation at 7000 xg for 15 min. The resultant pellet is washed again using 0.5M NaCl, 100 mM Tris, 50 mM EDTA, pH 7.4.

[0853] The resulting washed inclusion bodies are solubilized with 1.5 M guanidine hydrochloride (GuHCl) for 2-4 hours. After 7000 xg centrifugation for 15 min., the pellet is discarded and the polypeptide containing supernatant is incubated at 4° C. overnight to allow further GuHCl extraction.

[0854] Following high speed centrifugation (30,000 xg) to remove insoluble particles, the GuHCl solubilized protein is refolded by quickly mixing the GuHCl extract with 20 volumes of buffer containing 50 mM sodium, pH 4.5, 150 mM NaCl, 2 mM EDTA by vigorous stirring. The refolded diluted protein solution is kept at 4° C. without mixing for 12 hours prior to further purification steps.

[0855] To clarify the refolded polypeptide solution, a previously prepared tangential filtration unit equipped with 0.16 μm membrane filter with appropriate surface area (e.g., Filtron), equilibrated with 40 mM sodium acetate, pH 6.0 is employed. The filtered sample is loaded onto a cation exchange resin (e.g., Poros HS-50, Perseptive Biosystems). The column is washed with 40 mM sodium acetate, pH 6.0 and eluted with 250 mM, 500 mM, 1000 mM, and 1500 mM NaCl in the same buffer, in a stepwise manner. The absorbance at 280 nm of the effluent is continuously monitored. Fractions are collected and further analyzed by SDS-PAGE.

[0856] Fractions containing the polypeptide are then pooled and mixed with 4 volumes of water. The diluted sample is then loaded onto a previously prepared set of tandem columns of strong anion (Poros HQ-50, Perseptive Biosystems) and weak anion (Poros CM-20, Perseptive Biosystems) exchange resins. The columns are equilibrated with 40 mM sodium acetate, pH 6.0. Both columns are washed with 40 mM sodium acetate, pH 6.0, 200 mM NaCl. The CM-20 column is then eluted using a 10 column volume linear gradient ranging from 0.2 M NaCl, 50 mM sodium acetate, pH 6.0 to 1.0 M NaCl, 50 mM sodium acetate, pH 6.5. Fractions are collected under constant A₂₈₀ monitoring of the effluent. Fractions containing the polypeptide (determined, for instance, by 16% SDS-PAGE) are then pooled.

[0857] The resultant polypeptide should exhibit greater than 95% purity after the above refolding and purification steps. No major contaminant bands should be observed from Commassie blue stained 16% SDS-PAGE gel when 5 μg of purified protein is loaded. The purified protein can also be tested for endotoxin/LPS contamination, and typically the LPS content is less than 0.1 ng/ml according to LAL assays.

### EXAMPLE 7

### Cloning and Expression of a Polypeptide in a Baculovirus Expression System

[0858] In this example, the plasmid shuttle vector pA2 is used to insert a polynucleotide into a baculovirus to express a polypeptide. This expression vector contains the strong polyhedrin promoter of the Autographa californica nuclear polyhedrosis virus (AcMNPV) followed by convenient restriction sites such as BamHI, Xba I and Asp718. The polyadenylation site of the simian virus 40 (“SV40”) is used for efficient polyadenylation. For easy selection of recombinant virus, the plasmid contains the beta-galactosidase gene from E. Coli under control of a weak Drosophila promoter in the same orientation, followed by the polyadenylation signal of the polyhedrin gene. The inserted genes are flanked on both sides by viral sequences for cell-mediated homologous recombination with wild-type viral DNA to generate a viable virus that express the cloned polynucleotide.

[0859] Many other baculovirus vectors can be used in place of the vector above, such as pAc373, pVL941, and pAcIM1, as one skilled in the art would readily appreciate, as long as the construct provides appropriately located signals for transcription, translation, secretion and the like, including a signal peptide and an in-frame AUG as required. Such vectors are described, for instance, in Luckow et al., Virology 170:31-39 (1989).

[0860] Specifically, the cDNA sequence contained in the deposited clone, including the AUG initiation codon, is amplified using the PCR protocol described in Example 1. If a naturally occurring signal sequence is used to produce the polypeptide of the present invention, the pA2 vector does not need a second signal peptide. Alternatively, the vector can be modified (pA2 GP) to include a baculovirus leader sequence, using the standard methods described in Summers et al., “A Manual of Methods for Baculovirus Vectors and Insect Cell Culture Procedures,” Texas Agricultural Experimental Station Bulletin No. 1555 (1987).

[0861] The amplified fragment is isolated from a 1% agarose gel using a commercially available kit (“Geneclean,” BIO 101 Inc., La Jolla, Calif.). The fragment then is digested with appropriate restriction enzymes and again purified on a 1% agarose gel.

[0862] The plasmid is digested with the corresponding restriction enzymes and optionally, can be dephosphorylated using calf intestinal phosphatase, using routine procedures known in the art. The DNA is then isolated from a 1% agarose gel using a commercially available kit (“Geneclean” BIO 101 Inc., La Jolla, Calif.).

[0863] The fragment and the dephosphorylated plasmid are ligated together with T4 DNA ligase. E. coli HB101 or other suitable E. coli hosts such as XL-1 Blue (Stratagene Cloning Systems, La Jolla, Calif.) cells are transformed with the ligation mixture and spread on culture plates. Bacteria containing the plasmid are identified by digesting DNA from individual colonies and analyzing the digestion product by gel electrophoresis. The sequence of the cloned fragment is confirmed by DNA sequencing.

[0864] Five μg of a plasmid containing the polynucleotide is co-transfected with 1.0 μg of a commercially available linearized baculovirus DNA (“BaculoGold™ baculovirus DNA, Pharmingen, San Diego, Calif.), using the lipofection method described by Felgner et al., Proc. Natl. Acad. Sci. USA 84:7413-7417 (1987). One μg of BaculoGold™ virus DNA and 5 μg of the plasmid are mixed in a sterile well of a microtiter plate containing 50 μl of serum-free Grace's medium (Life Technologies Inc., Gaithersburg, Md.). Afterwards, 10 μl Lipofectin plus 90 μl Grace's medium are added, mixed and incubated for 15 minutes at room temperature. Then the transfection mixture is added drop-wise to Sf9 insect cells (ATCC CRL 1711) seeded in a 35 mm tissue culture plate with 1 ml Grace's medium without serum. The plate is then incubated for 5 hours at 27° C. The transfection solution is then removed from the plate and 1 ml of Grace's insect medium supplemented with 10% fetal calf serum is added. Cultivation is then continued at 27° C. for four days.

[0865] After four days the supernatant is collected and a plaque assay is performed, as described by Summers and Smith, supra. An agarose gel with “Blue Gal” (Life Technologies Inc., Gaithersburg) is used to allow easy identification and isolation of gal-expressing clones, which produce blue-stained plaques. (A detailed description of a “plaque assay” of this type can also be found in the user's guide for insect cell culture and baculovirology distributed by Life Technologies Inc., Gaithersburg, page 9-10.) After appropriate incubation, blue stained plaques are picked with the tip of a micropipettor (e.g., Eppendorf). The agar containing the recombinant viruses is then resuspended in a microcentrifuge tube containing 200 μl of Grace's medium and the suspension containing the recombinant baculovirus is used to infect Sf9 cells seeded in 35 mm dishes. Four days later the supernatants of these culture dishes are harvested and then they are stored at 4° C.

[0866] To verify the expression of the polypeptide, Sf9 cells are grown in Grace's medium supplemented with 10% heat-inactivated FBS. The cells are infected with the recombinant baculovirus containing the polynucleotide at a multiplicity of infection (“MOI”) of about 2. If radiolabeled proteins are desired, 6 hours later the medium is removed and is replaced with SF900 II medium minus methionine and cysteine (available from Life Technologies Inc., Rockville, Md.). After 42 hours, 5 μCi of ³⁵S-methionine and 5 μCi ³⁵S-cysteine (available from Amersham) are added. The cells are further incubated for 16 hours and then are harvested by centrifugation. The proteins in the supernatant as well as the intracellular proteins are analyzed by SDS-PAGE followed by autoradiography (if radiolabeled).

[0867] Microsequencing of the amino acid sequence of the amino terminus of purified protein may be used to determine the amino terminal sequence of the produced protein.

### EXAMPLE 8

### Expression of a Polypeptide in Mammalian Cells

[0868] The polypeptide of the present invention can be expressed in a mammalian cell. A typical mammalian expression vector contains a promoter element, which mediates the initiation of transcription of mRNA, a protein coding sequence, and signals required for the termination of transcription and polyadenylation of the transcript. Additional elements include enhancers, Kozak sequences and intervening sequences flanked by donor and acceptor sites for RNA splicing. Highly efficient transcription is achieved with the early and late promoters from SV40, the long terminal repeats (LTRs) from Retroviruses, e.g., RSV, HTLVI, HIVI and the early promoter of the cytomegalovirus (CMV). However, cellular elements can also be used (e.g., the human actin promoter).

[0869] Suitable expression vectors for use in practicing the present invention include, for example, vectors such as pSVL and pMSG (Pharmacia, Uppsala, Sweden), pRSVcat (ATCC 37152), pSV2dhfr (ATCC 37146), pBC12MI (ATCC 67109), pCMVSport 2.0, and pCMVSport 3.0. Mammalian host cells that could be used include, human Hela, 293, H9 and Jurkat cells, mouse NIH3T3 and C127 cells, Cos 1, Cos 7 and CV1, quail QC1-3 cells, mouse L cells and Chinese hamster ovary (CHO) cells.

[0870] Alternatively, the polypeptide can be expressed in stable cell lines containing the polynucleotide integrated into a chromosome. The co-transfection with a selectable marker such as DHFR, gpt, neomycin, or hygromycin allows the identification and isolation of the transfected cells.

[0871] The transfected gene can also be amplified to express large amounts of the encoded protein. The DHFR (dihydrofolate reductase) marker is useful in developing cell lines that carry several hundred or even several thousand copies of the gene of interest. (See, e.g., Alt, F. W., et al., J. Biol. Chem. 253:1357-1370 (1978); Hamlin, J. L. and Ma, C., Biochem. et Biophys. Acta, 1097:107-143 (1990); Page, M. J. and Sydenham, M. A., Biotechnology 9:64-68 (1991)). Another useful selection marker is the enzyme glutamine synthase (GS) (Murphy et al., Biochem J. 227:277-279 (1991); Bebbington et al., Bio/Technology 10:169-175 (1992). Using these markers, the mammalian cells are grown in selective medium and the cells with the highest resistance are selected. These cell lines contain the amplified gene(s) integrated into a chromosome. Chinese hamster ovary (CHO) and NSO cells are often used for the production of proteins.

[0872] Derivatives of the plasmid pSV2-dhfr (ATCC Accession No. 37146), the expression vectors pC4 (ATCC Accession No. 209646) and pC6 (ATCC Accession No.209647) contain the strong promoter (LTR) of the Rous Sarcoma Virus (Cullen et al., Molecular and Cellular Biology, 438-447 (March, 1985)) plus a fragment of the CMV-enhancer (Boshart et al., Cell 41:521-530 (1985)). Multiple cloning sites, e.g., with the restriction enzyme cleavage sites BamHI, XbaI and Asp718, facilitate the cloning of the gene of interest. The vectors also contain the 3′ intron, the polyadenylation and termination signal of the rat preproinsulin gene, and the mouse DHFR gene under control of the SV40 early promoter.

[0873] Specifically, the plasmid pC6, for example, is digested with appropriate restriction enzymes and then dephosphorylated using calf intestinal phosphates by procedures known in the art. The vector is then isolated from a 1% agarose gel.

[0874] A polynucleotide of the present invention is amplified according to the protocol outlined in Example 1. If a naturally occurring signal sequence is used to produce the polypeptide of the present invention, the vector does not need a second signal peptide. Alternatively, if a naturally occurring signal sequence is not used, the vector can be modified to include a heterologous signal sequence. (See, e.g., International Publication No. WO 96/34891.)

[0875] The amplified fragment is isolated from a 1% agarose gel using a commercially available kit (“Geneclean,” BIO 101 Inc., La Jolla, Calif.). The fragment then is digested with appropriate restriction enzymes and again purified on a 1% agarose gel.

[0876] The amplified fragment is then digested with the same restriction enzyme and purified on a 1% agarose gel. The isolated fragment and the dephosphorylated vector are then ligated with T4 DNA ligase. E. coli HB101 or XL-1 Blue cells are then transformed and bacteria are identified that contain the fragment inserted into plasmid pC6 using, for instance, restriction enzyme analysis.

[0877] Chinese hamster ovary cells lacking an active DHFR gene is used for transfection. Five μg of the expression plasmid pC6 or pC4 is cotransfected with 0.5 μg of the plasmid pSVneo using lipofectin (Felgner et al., supra). The plasmid pSV2-neo contains a dominant selectable marker, the neo gene from Tn5 encoding an enzyme that confers resistance to a group of antibiotics including G418. The cells are seeded in alpha minus MEM supplemented with 1 mg/ml G418. After 2 days, the cells are trypsinized and seeded in hybridoma cloning plates (Greiner, Germany) in alpha minus MEM supplemented with 10, 25, or 50 ng/ml of methotrexate plus 1 mg/ml G418. After about 10-14 days single clones are trypsinized and then seeded in 6-well petri dishes or 10 ml flasks using different concentrations of methotrexate (50 nM, 100 nM, 200 nM, 400 nM, 800 nM). Clones growing at the highest concentrations of methotrexate are then transferred to new 6-well plates containing even higher concentrations of methotrexate (1 μM, 2 μM, 5 μM, 10 mM, 20 mM). The same procedure is repeated until clones are obtained which grow at a concentration of 100-200 μM. Expression of the desired gene product is analyzed, for instance, by SDS-PAGE and Western blot or by reversed phase HPLC analysis.

### EXAMPLE 9

### Protein Fusions

[0878] The polypeptides of the present invention are preferably fused to other proteins. These fusion proteins can be used for a variety of applications. For example, fusion of the present polypeptides to His-tag, HA-tag, protein A, IgG domains, and maltose binding protein facilitates purification. (See Example 5; see also EP A 394,827; Traunecker, et al., Nature 331:84-86 (1988)). Similarly, fusion to IgG-1, IgG-3, and albumin increases the halflife time in vivo. Nuclear localization signals fused to the polypeptides of the present invention can target the protein to a specific subcellular localization, while covalent heterodimer or homodimers can increase or decrease the activity of a fusion protein. Fusion proteins can also create chimeric molecules having more than one function. Finally, fusion proteins can increase solubility and/or stability of the fused protein compared to the non-fused protein. All of the types of fusion proteins described above can be made by modifying the following protocol, which outlines the fusion of a polypeptide to an IgG molecule, or the protocol described in Example 5.

[0879] Briefly, the human Fc portion of the IgG molecule can be PCR amplified, using primers that span the 5′ and 3′ ends of the sequence described below. These primers also should have convenient restriction enzyme sites that will facilitate cloning into an expression vector, preferably a mammalian expression vector.

[0880] For example, if pC4 (ATCC Accession No. 209646) is used, the human Fc portion can be ligated into the BamHI cloning site. Note that the 3′ BamHI site should be destroyed. Next, the vector containing the human Fc portion is re-restricted with BamHI, linearizing the vector, and a polynucleotide of the present invention, isolated by the PCR protocol described in Example 1, is ligated into this BamHI site. Note that the polynucleotide is cloned without a stop codon, otherwise a fusion protein will not be produced.

[0881] If the naturally occurring signal sequence is used to produce the polypeptide of the present invention, pC4 does not need a second signal peptide. Alternatively, if the naturally occurring signal sequence is not used, the vector can be modified to include a heterologous signal sequence. (See, e.g., International Publication No. WO 96/34891.)

[0882] Human IgG Fc Region:

| | |
|---|---|
| GGGATCCGGAGCCCAAATCTTCTGACAAAACTCACAC | (SEQ ID NO:1) |
| ATGCCCACCGTGCCCAGCACCTGAATTCGAGGGTGCA | |
| CCGTCAGTCTTCCTCTTCCCCCCAAAACCCAAGGACA | |
| CCCTCATGATCTCCCGGACTCCTGAGGTCACATGCGT | |
| GGTGGTGGACGTAAGCCACGAAGACCCTGAGGTCAAG | |
| TTCAACTGGTACGTGGACGGCGTGGAGGTGCATAATG | |
| CCAAGACAAAGCCGCGGGAGGAGCAGTACAACAGCAC | |
| GTACCGTGTGGTCAGCGTCCTCACCGTCCTGCACCAG | |
| GACTGGCTGAATGGCAAGGAGTACAAGTGCAAGGTCT | |
| CCAACAAAGCCCTCCCAACCCCCATCGAGAAAACCAT | |
| CTCCAAAGCCAAAGGGCAGCCCCGAGAACCACAGGTG | |
| TACACCCTGCCCCCATCCCGGGATGAGCTGACCAAGA | |
| ACCAGGTCAGCCTGACCTGCCTGGTCAAAGGCTTCTA | |
| TCCAAGCGACATCGCCGTGGAGTGGGAGAGCAATGGG | |
| CAGCCGGAGAACAACTACAAGACCACGCCTCCCGTGC | |
| TGGACTCCGACGGCTCCTTCTTCCTCTACAGCAAGCT | |
| CACCGTGGACAAGAGCAGGTGGCAGCAGGGGAACGTC | |
| TTCTCATGCTCCGTGATGCATGAGGCTCTGCACAACC | |
| ACTACACGCAGAAGAGCCTCTCCCTGTCTCCGGGTAA | |
| ATGAGTGCGACGGCCGCGACTCTAGAGGAT | |

### EXAMPLE 10

### Production of an Antibody from a Polypeptide

[0883] a) Hybridoma Technology

[0884] The antibodies of the present invention can be prepared by a variety of methods. (See, Current Protocols, Chapter 2.) As one example of such methods, cells expressing a polypeptide of the present invention are administered to an animal to induce the production of sera containing polyclonal antibodies. In a preferred method, a preparation of a a polypeptide of the present invention is prepared and purified to render it substantially free of natural contaminants. Such a preparation is then introduced into an animal in order to produce polyclonal antisera of greater specific activity.

[0885] Monoclonal antibodies specific for a polypeptide of the present invention are prepared using hybridoma technology (Kohler et al., Nature 256:495 (1975); Kohler et al., Eur. J. Immunol. 6:511 (1976); Kohler et al., Eur. J. Immunol. 6:292 (1976); Hammerling et al., in: Monoclonal Antibodies and T-Cell Hybridomas, Elsevier, N.Y., pp. 563-681 (1981)). In general, an animal (preferably a mouse) is immunized with a polypeptide of the present invention or, more preferably, with a secreted polypeptide of the present invention-expressing cell. Such polypeptide-expressing cells are cultured in any suitable tissue culture medium, preferably in Earle's modified Eagle's medium supplemented with 10% fetal bovine serum (inactivated at about 56° C.), and supplemented with about 10 g/l of nonessential amino acids, about 1,000 U/ml of penicillin, and about 100 μg/ml of streptomycin.

[0886] The splenocytes of such mice are extracted and fused with a suitable myeloma cell line. Any suitable myeloma cell line may be employed in accordance with the present invention; however, it is preferable to employ the parent myeloma cell line (SP20), available from the ATCC. After fusion, the resulting hybridoma cells are selectively maintained in HAT medium, and then cloned by limiting dilution as described by Wands et al. (Gastroenterology 80:225-232 (1981)). The hybridoma cells obtained through such a selection are then assayed to identify clones which secrete antibodies capable of binding the polypeptide of the present invention.

[0887] Alternatively, additional antibodies capable of binding to polypeptide of the present invention can be produced in a two-step procedure using anti-idiotypic antibodies. Such a method makes use of the fact that antibodies are themselves antigens, and therefore, it is possible to obtain an antibody which binds to a second antibody. In accordance with this method, protein specific antibodies are used to immunize an animal, preferably a mouse. The splenocytes of such an animal are then used to produce hybridoma cells, and the hybridoma cells are screened to identify clones which produce an antibody whose ability to bind to the polypeptide of the present invention-specific antibody can be blocked by polypeptide of the present invention. Such antibodies comprise anti-idiotypic antibodies to the polypeptide of the present invention-specific antibody and are used to immunize an animal to induce formation of further polypeptide of the present invention-specific antibodies.

[0888] For in vivo use of antibodies in humans, an antibody is “humanized”. Such antibodies can be produced using genetic constructs derived from hybridoma cells producing the monoclonal antibodies described above. Methods for producing chimeric and humanized antibodies are known in the art and are discussed herein. (See, for review, Morrison, Science 229:1202 (1985); Oi et al., BioTechniques 4:214 (1986); Cabilly et al., U.S. Pat. No. 4,816,567; Taniguchi et al., EP 171496; Morrison et al., EP 173494; Neuberger et al., WO 8601533; Robinson et al., International Publication No. WO 8702671; Boulianne et al., Nature 312:643 (1984); Neuberger et al., Nature 314:268 (1985)).

[0889] b) Isolation Of Antibody Fragments Directed Against Polypeptide of the Present Invention From A Library Of scFvs

[0890] Naturally occurring V-genes isolated from human PBLs are constructed into a library of antibody fragments which contain reactivities against polypeptide of the present invention to which the donor may or may not have been exposed (see e.g., U.S. Pat. No. 5,885,793 incorporated herein by reference in its entirety).

[0891] Rescue of the Library. A library of scFvs is constructed from the RNA of human PBLs as described in International Publication No. WO 92/01047. To rescue phage displaying antibody fragments, approximately 10⁹ E. coli harboring the phagemid are used to inoculate 50 ml of 2×TY containing 1% glucose and 100 μg/ml of ampicillin (2×TY-AMP-GLU) and grown to an O.D. of 0.8 with shaking. Five ml of this culture is used to inoculate 50 ml of 2×TY-AMP-GLU, 2×108 TU of delta gene 3 helper (M13 delta gene III, see International Publication No. WO 92/01047) are added and the culture incubated at 37° C. for 45 minutes without shaking and then at 37° C. for 45 minutes with shaking. The culture is centrifuged at 4000 r.p.m. for 10 min. and the pellet resuspended in 2 liters of 2×TY containing 100 μg/ml ampicillin and 50 ug/ml kanamycin and grown overnight. Phage are prepared as described in International Publication No. WO 92/01047.

[0892] M13 delta gene III is prepared as follows: M13 delta gene III helper phage does not encode gene III protein, hence the phage(mid) displaying antibody fragments have a greater avidity of binding to antigen. Infectious M13 delta gene III particles are made by growing the helper phage in cells harboring a pUC19 derivative supplying the wild type gene III protein during phage morphogenesis. The culture is incubated for 1 hour at 37° C. without shaking and then for a further hour at 37° C. with shaking. Cells are spun down (IEC-Centra 8,400 r.p.m. for 10 min), resuspended in 300 ml 2×TY broth containing 100 μg ampicillin/ml and 25 μg kanamycin/ml (2×TY-AMP-KAN) and grown overnight, shaking at 37° C. Phage particles are purified and concentrated from the culture medium by two PEG-precipitations (Sambrook et al., 1990), resuspended in 2 ml PBS and passed through a 0.45 μm filter (Minisart NML; Sartorius) to give a final concentration of approximately 10¹³ transducing units/ml (ampicillin-resistant clones).

[0893] Panning of the Library. Immunotubes (Nunc) are coated overnight in PBS with 4 ml of either 100 μ/ml or 10 μg/ml of a polypeptide of the present invention. Tubes are blocked with 2% Marvel-PBS for 2 hours at 37° C. and then washed 3 times in PBS. Approximately 10¹³ TU of phage is applied to the tube and incubated for 30 minutes at room temperature tumbling on an over and under turntable and then left to stand for another 1.5 hours. Tubes are washed 10 times with PBS 0.1% Tween-20 and 10 times with PBS. Phage are eluted by adding 1 ml of 100 mM triethylamine and rotating 15 minutes on an under and over turntable after which the solution is immediately neutralized with 0.5 ml of 1.0M Tris-HCl, pH 7.4. Phage are then used to infect 10 ml of mid-log E. coli TG1 by incubating eluted phage with bacteria for 30 minutes at 37° C. The E. coli are then plated on TYE plates containing 1% glucose and 100 μg/ml ampicillin. The resulting bacterial library is then rescued with delta gene 3 helper phage as described above to prepare phage for a subsequent round of selection. This process is then repeated for a total of 4 rounds of affinity purification with tube-washing increased to 20 times with PBS, 0.1% Tween-20 and 20 times with PBS for rounds 3 and 4.

[0894] Characterization of Binders. Eluted phage from the 3rd and 4th rounds of selection are used to infect E. coli HB 2151 and soluble scFv is produced (Marks, et al., 1991) from single colonies for assay. ELISAs are performed with microtitre plates coated with either 10 pg/ml of the polypeptide of the present invention in 50 mM bicarbonate pH 9.6. Clones positive in ELISA are further characterized by PCR fingerprinting (see, e.g., International Publication No. WO 92/01047) and then by sequencing. These ELISA positive clones may also be further characterized by techniques known in the art, such as, for example, epitope mapping, binding affinity, receptor signal transduction, ability to block or competitively inhibit antibody/antigen binding, and competitive agonistic or antagonistic activity.

### EXAMPLE 11

### Method of Determining Alterations in a Gene Corresponding to a Polynucleotide

[0895] RNA isolated from entire families or individual patients presenting with a phenotype of interest (such as a disease) is isolated. cDNA is then generated from these RNA samples using protocols known in the art. (See, Sambrook.) The cDNA is then used as a template for PCR, employing primers surrounding regions of interest in SEQ ID NO:X; and/or the nucleotide sequence of the cDNA contained in Clone ID NO:Z. Suggested PCR conditions consist of 35 cycles at 95 degrees C. for 30 seconds; 60-120 seconds at 52-58 degrees C.; and 60-120 seconds at 70 degrees C., using buffer solutions described in Sidransky et al., Science 252:706 (1991).

[0896] PCR products are then sequenced using primers labeled at their 5′ end with T4 polynucleotide kinase, employing SequiTherm Polymerase (Epicentre Technologies). The intron-exon boundaries of selected exons is also determined and genomic PCR products analyzed to confirm the results. PCR products harboring suspected mutations are then cloned and sequenced to validate the results of the direct sequencing.

[0897] PCR products are cloned into T-tailed vectors as described in Holton et al., Nucleic Acids Research, 19:1156 (1991) and sequenced with T7 polymerase (United States Biochemical). Affected individuals are identified by mutations not present in unaffected individuals.

[0898] Genomic rearrangements are also observed as a method of determining alterations in a gene corresponding to a polynucleotide. Genomic clones isolated according to Example 2 are nick-translated with digoxigenindeoxy-uridine 5′-triphosphate (Boehringer Manheim), and FISH performed as described in Johnson et al., Methods Cell Biol. 35:73-99 (1991). Hybridization with the labeled probe is carried out using a vast excess of human cot-1 DNA for specific hybridization to the corresponding genomic locus.

[0899] Chromosomes are counterstained with 4,6-diamino-2-phenylidole and propidium iodide, producing a combination of C- and R-bands. Aligned images for precise mapping are obtained using a triple-band filter set (Chroma Technology, Brattleboro, Vt.) in combination with a cooled charge-coupled device camera (Photometrics, Tucson, Ariz.) and variable excitation wavelength filters. (Johnson et al., Genet. Anal. Tech. Appl., 8:75 (1991)). Image collection, analysis and chromosomal fractional length measurements are performed using the ISee Graphical Program System. (Inovision Corporation, Durham, N.C.) Chromosome alterations of the genomic region hybridized by the probe are identified as insertions, deletions, and translocations. These alterations are used as a diagnostic marker for an associated disease.

### EXAMPLE 12

### Method of Detecting Abnormal Levels of a Polypeptide in a Biological Sample

[0900] A polypeptide of the present invention can be detected in a biological sample, and if an increased or decreased level of the polypeptide is detected, this polypeptide is a marker for a particular phenotype. Methods of detection are numerous, and thus, it is understood that one skilled in the art can modify the following assay to fit their particular needs.

[0901] For example, antibody-sandwich ELISAs are used to detect polypeptides in a sample, preferably a biological sample. Wells of a microtiter plate are coated with specific antibodies, at a final concentration of 0.2 to 10 ug/ml. The antibodies are either monoclonal or polyclonal and are produced by the method described in Example 10. The wells are blocked so that non-specific binding of the polypeptide to the well is reduced.

[0902] The coated wells are then incubated for >2 hours at RT with a sample containing the polypeptide. Preferably, serial dilutions of the sample should be used to validate results. The plates are then washed three times with deionized or distilled water to remove unbound polypeptide.

[0903] Next, 50 ul of specific antibody-alkaline phosphatase conjugate, at a concentration of 25-400 ng, is added and incubated for 2 hours at room temperature. The plates are again washed three times with deionized or distilled water to remove unbound conjugate.

[0904] Add 75 ul of 4-methylumbelliferyl phosphate (MUP) or p-nitrophenyl phosphate (NPP) substrate solution to each well and incubate 1 hour at room temperature. Measure the reaction by a microtiter plate reader. Prepare a standard curve, using serial dilutions of a control sample, and plot polypeptide concentration on the X-axis (log scale) and fluorescence or absorbance of the Y-axis (linear scale). Interpolate the concentration of the polypeptide in the sample using the standard curve.

### EXAMPLE 13

### Formulation

[0905] The invention also provides methods of treatment and/or prevention of diseases or disorders (such as, for example, any one or more of the diseases or disorders disclosed herein) by administration to a subject of an effective amount of a Therapeutic. By therapeutic is meant polynucleotides or polypeptides of the invention (including fragments and variants), agonists or antagonists thereof, and/or antibodies thereto, in combination with a pharmaceutically acceptable carrier type (e.g., a sterile carrier).

[0906] The Therapeutic will be formulated and dosed in a fashion consistent with good medical practice, taking into account the clinical condition of the individual patient (especially the side effects of treatment with the Therapeutic alone), the site of delivery, the method of administration, the scheduling of administration, and other factors known to practitioners. The “effective amount” for purposes herein is thus determined by such considerations.

[0907] As a general proposition, the total pharmaceutically effective amount of the Therapeutic administered parenterally per dose will be in the range of about 1 ug/kg/day to 10 mg/kg/day of patient body weight, although, as noted above, this will be subject to therapeutic discretion. More preferably, this dose is at least 0.01 mg/kg/day, and most preferably for humans between about 0.01 and 1 mg/kg/day for the hormone. If given continuously, the Therapeutic is typically administered at a dose rate of about 1 ug/kg/hour to about 50 ug/kg/hour, either by 1-4 injections per day or by continuous subcutaneous infusions, for example, using a mini-pump. An intravenous bag solution may also be employed. The length of treatment needed to observe changes and the interval following treatment for responses to occur appears to vary depending on the desired effect.

[0908] Therapeutics can be are administered orally, rectally, parenterally, intracistemally, intravaginally, intraperitoneally, topically (as by powders, ointments, gels, drops or transdermal patch), bucally, or as an oral or nasal spray. “Pharmaceutically acceptable carrier” refers to a non-toxic solid, semisolid or liquid filler, diluent, encapsulating material or formulation auxiliary of any. The term “parenteral” as used herein refers to modes of administration which include intravenous, intramuscular, intraperitoneal, intrasternal, subcutaneous and intraarticular injection and infusion.

[0909] Therapeutics of the invention are also suitably administered by sustained-release systems. Suitable examples of sustained-release Therapeutics are administered orally, rectally, parenterally, intracistemally, intravaginally, intraperitoneally, topically (as by powders, ointments, gels, drops or transdermal patch), bucally, or as an oral or nasal spray. “Pharmaceutically acceptable carrier” refers to a non-toxic solid, semisolid or liquid filler, diluent, encapsulating material or formulation auxiliary of any type. The term “parenteral” as used herein refers to modes of administration which include intravenous, intramuscular, intraperitoneal, intrastenal, subcutaneous and intraarticular injection and infusion.

[0910] Therapeutics of the invention are also suitably administered by sustained-release systems. Suitable examples of sustained-release Therapeutics include suitable polymeric materials (such as, for example, semi-permeable polymer matrices in the form of shaped articles, e.g., films, or mirocapsules), suitable hydrophobic materials (for example as an emulsion in an acceptable oil) or ion exchange resins, and sparingly soluble derivatives (such as, for example, a sparingly soluble salt).

[0911] Sustained-release matrices include polylactides (U.S. Pat. No. 3,773,919, EP 58,481), copolymers of L-glutamic acid and gamma-ethyl-L-glutamate (Sidman et al., Biopolymers 22:547-556 (1983)), poly (2- hydroxyethyl methacrylate) (Langer et al., J. Biomed. Mater. Res. 15:167-277 (1981), and Langer, Chem. Tech. 12:98-105 (1982)), ethylene vinyl acetate (Langer et al., Id.) or poly-D-(-)-3-hydroxybutyric acid (EP 133,988).

[0912] Sustained-release Therapeutics also include liposomally entrapped Therapeutics of the invention (see generally, Langer, Science 249:1527-1533 (1990); Treat et al., in Liposomes in the Therapy of Infectious Disease and Cancer, Lopez-Berestein and Fidler (eds.), Liss, N.Y., pp. 317-327 and 353-365 (1989)). Liposomes containing the Therapeutic are prepared by methods known per se: DE 3,218,121; Epstein et al., Proc. Natl. Acad. Sci. (USA) 82:3688-3692 (1985); Hwang et al., Proc. Natl. Acad. Sci.(USA) 77:4030-4034 (1980); EP 52,322; EP 36,676; EP 88,046; EP 143,949; EP 142,641; Japanese Pat. Appl. 83-118008; U.S. Pat. Nos. 4,485,045 and 4,544,545; and EP 102,324. Ordinarily, the liposomes are of the small (about 200-800 Angstroms) unilamellar type in which the lipid content is greater than about 30 mol. percent cholesterol, the selected proportion being adjusted for the optimal Therapeutic.

[0913] In yet an additional embodiment, the Therapeutics of the invention are delivered by way of a pump (see Langer, supra; Sefton, CRC Crit. Ref. Biomed. Eng. 14:201 (1987); Buchwald et al., Surgery 88:507 (1980); Saudek et al., N. Engl. J. Med. 321:574 (1989)).

[0914] Other controlled release systems are discussed in the review by Langer (Science 249:1527-1533 (1990)).

[0915] For parenteral administration, in one embodiment, the Therapeutic is formulated generally by mixing it at the desired degree of purity, in a unit dosage injectable form (solution, suspension, or emulsion), with a pharmaceutically acceptable carrier, i.e., one that is non-toxic to recipients at the dosages and concentrations employed and is compatible with other ingredients of the formulation. For example, the formulation preferably does not include oxidizing agents and other compounds that are known to be deleterious to the Therapeutic.

[0916] Generally, the formulations are prepared by contacting the Therapeutic uniformly and intimately with liquid carriers or finely divided solid carriers or both. Then, if necessary, the product is shaped into the desired formulation. Preferably the carrier is a parenteral carrier, more preferably a solution that is isotonic with the blood of the recipient. Examples of such carrier vehicles include water, saline, Ringer's solution, and dextrose solution. Non-aqueous vehicles such as fixed oils and ethyl oleate are also useful herein, as well as liposomes.

[0917] The carrier suitably contains minor amounts of additives such as substances that enhance isotonicity and chemical stability. Such materials are non-toxic to recipients at the dosages and concentrations employed, and include buffers such as phosphate, citrate, succinate, acetic acid, and other organic acids or their salts; antioxidants such as ascorbic acid; low molecular weight (less than about ten residues) polypeptides, e.g., polyarginine or tripeptides; proteins, such as serum albumin, gelatin, or immunoglobulins; hydrophilic polymers such as polyvinylpyrrolidone; amino acids, such as glycine, glutamic acid, aspartic acid, or arginine; monosaccharides, disaccharides, and other carbohydrates including cellulose or its derivatives, glucose, manose, or dextrins; chelating agents such as EDTA; sugar alcohols such as mannitol or sorbitol; counterions such as sodium; and/or nonionic surfactants such as polysorbates, poloxamers, or PEG.

[0918] The Therapeutic is typically formulated in such vehicles at a concentration of about 0.1 mg/ml to 100 mg/ml, preferably 1-10 mg/ml, at a pH of about 3 to 8. It will be understood that the use of certain of the foregoing excipients, carriers, or stabilizers will result in the formation of polypeptide salts.

[0919] Any pharmaceutical used for therapeutic administration can be sterile. Sterility is readily accomplished by filtration through sterile filtration membranes (e.g., 0.2 micron membranes). Therapeutics generally are placed into a container having a sterile access port, for example, an intravenous solution bag or vial having a stopper pierceable by a hypodermic injection needle.

[0920] Therapeutics ordinarily will be stored in unit or multi-dose containers, for example, sealed ampoules or vials, as an aqueous solution or as a lyophilized formulation for reconstitution. As an example of a lyophilized formulation, 10-ml vials are filled with 5 ml of sterile-filtered 1% (w/v) aqueous Therapeutic solution, and the resulting mixture is lyophilized. The infusion solution is prepared by reconstituting the lyophilized Therapeutic using bacteriostatic Water-for-Injection.

[0921] The invention also provides a pharmaceutical pack or kit comprising one or more containers filled with one or more of the ingredients of the Therapeutics of the invention. Associated with such container(s) can be a notice in the form prescribed by a governmental agency regulating the manufacture, use or sale of pharmaceuticals or biological products, which notice reflects approval by the agency of manufacture, use or sale for human administration. In addition, the Therapeutics may be employed in conjunction with other therapeutic compounds.

[0922] The Therapeutics of the invention may be administered alone or in combination with adjuvants. Adjuvants that may be administered with the Therapeutics of the invention include, but are not limited to, alum, alum plus deoxycholate (ImmunoAg), MTP-PE (Biocine Corp.), QS21 (Genentech, Inc.), BCG (e.g., THERACYS®), MPL and nonviable prepartions of Corynebacterium parvum. In a specific embodiment, Therapeutics of the invention are administered in combination with alum. In another specific embodiment, Therapeutics of the invention are administered in combination with QS-21. Further adjuvants that may be administered with the Therapeutics of the invention include, but are not limited to, Monophosphoryl lipid immunomodulator, AdjuVax 100a, QS-21, QS-18, CRL1005, Aluminum salts, MF-59, and Virosomal adjuvant technology. Vaccines that may be administered with the Therapeutics of the invention include, but are not limited to, vaccines directed toward protection against MMR (measles, mumps, rubella), polio, varicella, tetanus/diptheria, hepatitis A, hepatitis B, haemophilus influenzae B, whooping cough, pneumonia, influenza, Lyme's Disease, rotavirus, cholera, yellow fever, Japanese encephalitis, poliomyelitis, rabies, typhoid fever, and pertussis. Combinations may be administered either concomitantly, e.g., as an admixture, separately but simultaneously or concurrently; or sequentially. This includes presentations in which the combined agents are administered together as a therapeutic mixture, and also procedures in which the combined agents are administered separately but simultaneously, e.g., as through separate intravenous lines into the same individual. Administration “in combination” further includes the separate administration of one of the compounds or agents given first, followed by the second.

[0923] The Therapeutics of the invention may be administered alone or in combination with other therapeutic agents. Therapeutic agents that may be administered in combination with the Therapeutics of the invention, include but not limited to, chemotherapeutic agents, antibiotics, steroidal and non-steroidal anti-inflammatories, conventional immunotherapeutic agents, and/or therapeutic treatments described below. Combinations may be administered either concomitantly, e.g., as an admixture, separately but simultaneously or concurrently; or sequentially. This includes presentations in which the combined agents are administered together as a therapeutic mixture, and also procedures in which the combined agents are administered separately but simultaneously, e.g., as through separate intravenous lines into the same individual. Administration “in combination” further includes the separate administration of one of the compounds or agents given first, followed by the second.

[0924] In one embodiment, the Therapeutics of the invention are administered in combination with an anticoagulant. Anticoagulants that may be administered with the compositions of the invention include, but are not limited to, heparin, low molecular weight heparin, warfarin sodium (e.g., COUMADIN®), dicumarol, 4-hydroxycoumarin, anisindione (e.g., MIRADON™), acenocoumarol (e.g., nicoumalone, SINTHROME™), indan-1,3-dione, phenprocoumon (e.g., MARCUMAR™), ethyl biscoumacetate (e.g., TROMEXAN™), and aspirin. In a specific embodiment, compositions of the invention are administered in combination with heparin and/or warfarin. In another specific embodiment, compositions of the invention are administered in combination with warfarin. In another specific embodiment, compositions of the invention are administered in combination with warfarin and aspirin. In another specific embodiment, compositions of the invention are administered in combination with heparin. In another specific embodiment, compositions of the invention are administered in combination with heparin and aspirin.

[0925] In another embodiment, the Therapeutics of the invention are administered in combination with thrombolytic drugs. Thrombolytic drugs that may be administered with the compositions of the invention include, but are not limited to, plasminogen, lys-plasminogen, alpha2-antiplasmin, streptokinae (e.g., KABIKINASE™), antiresplace (e.g., EMINASE™), tissue plasminogen activator (t-PA, altevase, ACTIVASE™), urokinase (e.g., ABBOKINASE™), sauruplase, (Prourokinase, single chain urokinase), and aminocaproic acid (e.g., AMICAR™). In a specific embodiment, compositions of the invention are administered in combination with tissue plasminogen activator and aspirin.

[0926] In another embodiment, the Therapeutics of the invention are administered in combination with antiplatelet drugs. Antiplatelet drugs that may be administered with the compositions of the invention include, but are not limited to, aspirin, dipyridamole (e.g., PERSANTINE™), and ticlopidine (e.g., TICLID™).

[0927] In specific embodiments, the use of anti-coagulants, thrombolytic and/or antiplatelet drugs in combination with Therapeutics of the invention is contemplated for the prevention, diagnosis, and/or treatment of thrombosis, arterial thrombosis, venous thrombosis, thromboembolism, pulmonary embolism, atherosclerosis, myocardial infarction, transient ischemic attack, unstable angina. In specific embodiments, the use of anticoagulants, thrombolytic drugs and/or antiplatelet drugs in combination with Therapeutics of the invention is contemplated for the prevention of occulsion of saphenous grafts, for reducing the risk of periprocedural thrombosis as might accompany angioplasty procedures, for reducing the risk of stroke in patients with atrial fibrillation including nonrheumatic atrial fibrillation, for reducing the risk of embolism associated with mechanical heart valves and or mitral valves disease. Other uses for the therapeutics of the invention, alone or in combination with antiplatelet, anticoagulant, and/or thrombolytic drugs, include, but are not limited to, the prevention of occlusions in extracorporeal devices (e.g., intravascular canulas, vascular access shunts in hemodialysis patients, hemodialysis machines, and cardiopulmonary bypass machines).

[0928] In certain embodiments, Therapeutics of the invention are administered in combination with antiretroviral agents, nucleoside/nucleotide reverse transcriptase inhibitors (NRTIs), non-nucleoside reverse transcriptase inhibitors (NNRTIs), and/or protease inhibitors (PIs). NRTIs that may be administered in combination with the Therapeutics of the invention, include, but are not limited to, RETROVIR™ (zidovudine/AZT), VIDEX™ (didanosine/ddI), HIVID™ (zalcitabine/ddC), ZERIT™ (stavudine/d4T), EPIVIR™ (lamivudine/3TC), and COMBIVIR™ (zidovudine/lamivudine). NNRTIs that may be administered in combination with the Therapeutics of the invention, include, but are not limited to, VIRAMUNE™ (nevirapine), RESCRIPTOR™ (delavirdine), and SUSTIVA™ (efavirenz). Protease inhibitors that may be administered in combination with the Therapeutics of the invention, include, but are not limited to, CRIXIVAN™ (indinavir), NORVIR™ (ritonavir), INVIRASE™ (saquinavir), and VIRACEPT™ (nelfinavir). In a specific embodiment, antiretroviral agents, nucleoside reverse transcriptase inhibitors, non-nucleoside reverse transcriptase inhibitors, and/or protease inhibitors may be used in any combination with Therapeutics of the invention to treat AIDS and/or to prevent or treat HIV infection.

[0929] Additional NRTIs include LODENOSINE™ (F-ddA; an acid-stable adenosine NRTI; Triangle/Abbott; COVIRACIL™ (emtricitabine/FTC; structurally related to lamivudine (3TC) but with 3- to 10-fold greater activity in vitro; Triangle/Abbott); dOTC (BCH-10652, also structurally related to lamivudine but retains activity against a substantial proportion of lamivudine-resistant isolates; Biochem Pharma); Adefovir (refused approval for anti-HIV therapy by FDA; Gilead Sciences); PREVEON® (Adefovir Dipivoxil, the active prodrug of adefovir; its active form is PMEA-pp); TENOFOVIR™ (bis-POC PMPA, a PMPA prodrug; Gilead); DAPD/DXG (active metabolite of DAPD; Triangle/Abbott); DD4FC (related to 3TC, with activity against AZT/3TC-resistant virus); GW420867X (Glaxo Wellcome); ZIAGEN™ (abacavir/159U89; Glaxo Wellcome Inc.); CS-87 (3′azido-2′,3′-dideoxyuridine; WO 99/66936); and S-acyl-2-thioethyl (SATE)-bearing prodrug forms of β-L-FD4C and β-L-FddC (WO 98/17281).

[0930] Additional NNRTIs include COACTINON™ (Emivirine/MKC-442, potent NNRTI of the HEPT class; Triangle/Abbott); CAPRAVIRINE™ (AG-1549/S-1153, a next generation NNRTI with activity against viruses containing the K103N mutation; Agouron); PNU-142721 (has 20- to 50-fold greater activity than its predecessor delavirdine and is active against K103N mutants; Pharmacia & Upjohn); DPC-961 and DPC-963 (second-generation derivatives of efavirenz, designed to be active against viruses with the K103N mutation; DuPont); GW-420867X (has 25-fold greater activity than HBY097 and is active against K103N mutants; Glaxo Wellcome); CALANOLIDE A (naturally occurring agent from the latex tree; active against viruses containing either or both the Y181C and K103N mutations); and Propolis (WO 99/49830).

[0931] Additional protease inhibitors include LOPINAVIR™ (ABT378/r; Abbott Laboratories); BMS-232632 (an azapeptide; Bristol-Myres Squibb); TIPRANAVIR™ (PNU-140690, a non-peptic dihydropyrone; Pharmacia & Upjohn); PD-178390 (a nonpeptidic dihydropyrone; Parke-Davis); BMS 232632 (an azapeptide; Bristol-Myers Squibb); L-756,423 (an indinavir analog; Merck); DMP-450 (a cyclic urea compound; Avid & DuPont); AG-1776 (a peptidomimetic with in vitro activity against protease inhibitor-resistant viruses; Agouron); VX-175/GW-433908 (phosphate prodrug of amprenavir; Vertex & Glaxo Welcome); CGP61755 (Ciba); and AGENERASE™ (amprenavir; Glaxo Wellcome Inc.).

[0932] Additional antiretroviral agents include fusion inhibitors/gp41 binders. Fusion inhibitors/gp41 binders include T-20 (a peptide from residues 643-678 of the HIV gp41 transmembrane protein ectodomain which binds to gp41 in its resting state and prevents transformation to the fusogenic state; Trimeris) and T-1249 (a second-generation fusion inhibitor; Trimeris).

[0933] Additional antiretroviral agents include fusion inhibitors/chemokine receptor antagonists. Fusion inhibitors/chemokine receptor antagonists include CXCR4 antagonists such as AMD 3100 (a bicyclam), SDF-1 and its analogs, and ALX40-4C (a cationic peptide), T22 (an 18 amino acid peptide; Trimeris) and the T22 analogs T134 and T140; CCR5 antagonists such as RANTES (9-68), AOP-RANTES, NNY-RANTES, and TAK-779; and CCR5/CXCR4 antagonists such as NSC 651016 (a distamycin analog). Also included are CCR2B, CCR3, and CCR6 antagonists. Chemokine recpetor agonists such as RANTES, SDF-1, MIP-1α, MIP-1β, etc., may also inhibit fusion.

[0934] Additional antiretroviral agents include integrase inhibitors. Integrase inhibitors include dicaffeoylquinic (DFQA) acids; L-chicoric acid (a dicaffeoyltartaric (DCTA) acid); quinalizarin (QLC) and related anthraquinones; ZINTEVIR™ (AR 177, an oligonucleotide that probably acts at cell surface rather than being a true integrase inhibitor; Arondex); and naphthols such as those disclosed in WO 98/50347.

[0935] Additional antiretroviral agents include hydroxyurea-like compunds such as BCX-34 (a purine nucleoside phosphorylase inhibitor; Biocryst); ribonucleotide reductase inhibitors such as DIDOX™ (Molecules for Health); inosine monophosphate dehydrogenase (IMPDH) inhibitors sucha as VX-497 (Vertex); and mycopholic acids such as CellCept (mycophenolate mofetil; Roche).

[0936] Additional antiretroviral agents include inhibitors of viral integrase, inhibitors of viral genome nuclear translocation such as arylene bis(methylketone) compounds; inhibitors of HIV entry such as AOP-RANTES, NNY-RANTES, RANTES-IgG fusion protein, soluble complexes of RANTES and glycosaminoglycans (GAG), and AMD-3100; nucleocapsid zinc finger inhibitors such as dithiane compounds; targets of HIV Tat and Rev; and pharmacoenhancers such as ABT-378.

[0937] Other antiretroviral therapies and adjunct therapies include cytokines and lymphokines such as MIP-1α, MIP-1β, SDF-1α, IL-2, PROLEUKIN™ (aldesleukin/L2-7001; Chiron), IL-4, IL-10, IL-12, and IL-13; interferons such as IFN-α2a; antagonists of TNFs, NFκB, GM-CSF, M-CSF, and IL-10; agents that modulate immune activation such as cyclosporin and prednisone; vaccines such as Remune™ (HIV Immunogen), APL 400-003 (Apollon), recombinant gp120 and fragments, bivalent (B/E) recombinant envelope glycoprotein, rgp120CM235, MN rgp120, SF-2 rgp120, gp120/soluble CD4 complex, Delta JR-FL protein, branched synthetic peptide derived from discontinuous gp120 C3/C4 domain, fusion-competent immunogens, and Gag, Pol, Nef, and Tat vaccines; gene-based therapies such as genetic suppressor elements (GSEs; WO 98/54366), and intrakines (genetically modified CC chemokines targetted to the ER to block surface expression of newly synthesized CCR5 (Yang et al., PNAS 94:11567-72 (1997); Chen et al., Nat. Med. 3:1110-16 (1997)); antibodies such as the anti-CXCR4 antibody 12G5, the anti-CCR5 antibodies 2D7, 5C7, PA8, PA9, PA10, PA11, PA12, and PA14, the anti-CD4 antibodies Q4120 and RPA-T4, the anti-CCR3 antibody 7B11, the anti-gp120 antibodies 17b, 48d, 447-52D, 257-D, 268-D and 50.1, anti-Tat antibodies, anti-TNF-α antibodies, and monoclonal antibody 33A; aryl hydrocarbon (AH) receptor agonists and antagonists such as TCDD, 3,3′,4,4′,5-pentachlorobiphenyl, 3,3′,4,4′-tetrachlorobiphenyl, and α-naphthoflavone (WO 98/30213); and antioxidants such as γ-L-glutamyl-L-cysteine ethyl ester (γ-GCE; WO 99/56764).

[0938] In a further embodiment, the Therapeutics of the invention are administered in combination with an antiviral agent. Antiviral agents that may be administered with the Therapeutics of the invention include, but are not limited to, acyclovir, ribavirin, amantadine, and remantidine.

[0939] In other embodiments, Therapeutics of the invention may be administered in combination with anti-opportunistic infection agents. Anti-opportunistic agents that may be administered in combination with the Therapeutics of the invention, include, but are not limited to, TRIMETHOPRIM-SULFAMETHOXAZOLE™, DAPSONE™, PENTAMIDINE™, ATOVAQUONE™, ISONIAZID™, RIFAMPIN™, PYRAZINAMIDE™, ETHAMBUTOL™, RIFABUTIN™, CLARITHROMYCIN™, AZITHROMYCIN™, GANCICLOVIR™, FOSCARNET™, CIDOFOVIR™, FLUCONAZOLE™, ITRACONAZOLE™, KETOCONAZOLE™, ACYCLOVIR™, FAMCICOLVIR™, PYRIMETHAMINE™, LEUCOVORIN™, NEUPOGEN™ (filgrastim/G-CSF), and LEUKINE™ (sargramostim/GM-CSF). In a specific embodiment, Therapeutics of the invention are used in any combination with TRIMETHOPRIM-SULFAMETHOXAZOLE™, DAPSONE™, PENTAMIDINE™, and/or ATOVAQUONE™ to prophylactically treat or prevent an opportunistic Pneumocystis carinii pneumonia infection. In another specific embodiment, Therapeutics of the invention are used in any combination with ISONIAZID™, RIFAMPIN™, PYRAZINAMIDE™, and/or ETHAMBUTOL™ to prophylactically treat or prevent an opportunistic Mycobacterium avium complex infection. In another specific embodiment, Therapeutics of the invention are used in any combination with RIFABUTIN™, CLARITHROMYCIN™, and/or AZITHROMYCIN™ to prophylactically treat or prevent an opportunistic Mycobacterium tuberculosis infection. In another specific embodiment, Therapeutics of the invention are used in any combination with GANCICLOVIR™, FOSCARNET™, and/or CIDOFOVIR™ to prophylactically treat or prevent an opportunistic cytomegalovirus infection. In another specific embodiment, Therapeutics of the invention are used in any combination with FLUCONAZOLE™, ITRACONAZOLE™, and/or KETOCONAZOLE™ to prophylactically treat or prevent an opportunistic fungal infection. In another specific embodiment, Therapeutics of the invention are used in any combination with ACYCLOVIR™ and/or FAMCICOLVIR™ to prophylactically treat or prevent an opportunistic herpes simplex virus type I and/or type II infection. In another specific embodiment, Therapeutics of the invention are used in any combination with PYRIMETHAMNE™ and/or LEUCOVORIN™ to prophylactically treat or prevent an opportunistic Toxoplasma gondii infection. In another specific embodiment, Therapeutics of the invention are used in any combination with LEUCOVORIN™ and/or NEUPOGEN™ to prophylactically treat or prevent an opportunistic bacterial infection.

[0940] In a further embodiment, the Therapeutics of the invention are administered in combination with an antibiotic agent. Antibiotic agents that may be administered with the Therapeutics of the invention include, but are not limited to, amoxicillin, beta-lactamases, aminoglycosides, beta-lactam (glycopeptide), beta-lactamases, Clindamycin, chloramphenicol, cephalosporins, ciprofloxacin, erythromycin, fluoroquinolones, macrolides, metronidazole, penicillins, quinolones, rapamycin, rifampin, streptomycin, sulfonamide, tetracyclines, trimethoprim, trimethoprim-sulfamethoxazole, and vancomycin.

[0941] In other embodiments, the Therapeutics of the invention are administered in combination with immunestimulants. Immunostimulants that may be administered in combination with the Therapeutics of the invention include, but are not limited to, levamisole (e.g., ERGAMISOL™), isoprinosine (e.g. INOSIPLEX™), interferons (e.g. interferon alpha), and interleukins (e.g., IL-2).

[0942] In other embodiments, Therapeutics of the invention are administered in combination with immunosuppressive agents. Immunosuppressive agents that may be administered in combination with the Therapeutics of the invention include, but are not limited to, steroids, cyclosporine, cyclosporine analogs, cyclophosphamide methylprednisone, prednisone, azathioprine, FK-506, 15-deoxyspergualin, and other immunosuppressive agents that act by suppressing the function of responding T cells. Other immunosuppressive agents that may be administered in combination with the Therapeutics of the invention include, but are not limited to, prednisolone, methotrexate, thalidomide, methoxsalen, rapamycin, leflunomide, mizoribine (BREDNIN™), brequinar, deoxyspergualin, and azaspirane (SKF 105685), ORTHOCLONE OKT® 3 (muromonab-CD3), SANDIMMUNE™, NEORAL™, SANGDYA™ (cyclosporine), PROGRAF® (FK506, tacrolimus), CELLCEPT® (mycophenolate motefil, of which the active metabolite is mycophenolic acid), IMURAN™ (azathioprine), glucocorticosteroids, adrenocortical steroids such as DELTASONE™ (prednisone) and HYDELTRASOL™ (prednisolone), FOLEX™ and MEXATE™ (methotrxate), OXSORALEN-ULTRA™ (methoxsalen) and RAPAMUNE™ (sirolimus). In a specific embodiment, immunosuppressants may be used to prevent rejection of organ or bone marrow transplantation.

[0943] In an additional embodiment, Therapeutics of the invention are administered alone or in combination with one or more intravenous immune globulin preparations. Intravenous immune globulin preparations that may be administered with the Therapeutics of the invention include, but not limited to, GAMMAR™, IVEEGAM™, SANDOGLOBULIN™, GAMMAGARD S/D™, ATGAM™ (antithymocyte glubulin), and GAMIMUNE™. In a specific embodiment, Therapeutics of the invention are administered in combination with intravenous immune globulin preparations in transplantation therapy (e.g., bone marrow transplant).

[0944] In certain embodiments, the Therapeutics of the invention are administered alone or in combination with an anti-inflammatory agent. Anti-inflammatory agents that may be administered with the Therapeutics of the invention include, but are not limited to, corticosteroids (e.g. betamethasone, budesonide, cortisone, dexamethasone, hydrocortisone, methylprednisolone, prednisolone, prednisone, and triamcinolone), nonsteroidal anti-inflammatory drugs (e.g., diclofenac, diflunisal, etodolac, fenoprofen, floctafenine, flurbiprofen, ibuprofen, indomethacin, ketoprofen, meclofenamate, mefenamic acid, meloxicam, nabumetone, naproxen, oxaprozin, phenylbutazone, piroxicam, sulindac, tenoxicam, tiaprofenic acid, and tolmetin.), as well as antihistamines, aminoarylcarboxylic acid derivatives, arylacetic acid derivatives, arylbutyric acid derivatives, arylcarboxylic acids, arylpropionic acid derivatives, pyrazoles, pyrazolones, salicylic acid derivatives, thiazinecarboxamides, e-acetamidocaproic acid, S-adenosylmethionine, 3-amino-4-hydroxybutyric acid, amixetrine, bendazac, benzydamine, bucolome, difenpiramide, ditazol, emorfazone, guaiazulene, nabumetone, nimesulide, orgotein, oxaceprol, paranyline, perisoxal, pifoxime, proquazone, proxazole, and tenidap.

[0945] In an additional embodiment, the compositions of the invention are administered alone or in combination with an anti-angiogenic agent. Anti-angiogenic agents that may be administered with the compositions of the invention include, but are not limited to, Angiostatin (Entremed, Rockville, Md.), Troponin-1 (Boston Life Sciences, Boston, Mass.), anti-Invasive Factor, retinoic acid and derivatives thereof, paclitaxel (Taxol), Suramin, Tissue Inhibitor of Metalloproteinase-1, Tissue inhibitor of Metalloproteinase-2, VEGI, Plasminogen Activator Inhibitor-1, Plasminogen Activator Inhibitor-2, and various forms of the lighter “d group” transition metals.

[0946] Lighter “d group” transition metals include, for example, vanadium, molybdenum, tungsten, titanium, niobium, and tantalum species. Such transition metal species may form transition metal complexes. Suitable complexes of the above-mentioned transition metal species include oxo transition metal complexes.

[0947] Representative examples of vanadium complexes include oxo vanadium complexes such as vanadate and vanadyl complexes. Suitable vanadate complexes include metavanadate and orthovanadate complexes such as, for example, ammonium metavanadate, sodium metavanadate, and sodium orthovanadate. Suitable vanadyl complexes include, for example, vanadyl acetylacetonate and vanadyl sulfate including vanadyl sulfate hydrates such as vanadyl sulfate mono- and trihydrates.

[0948] Representative examples of tungsten and molybdenum complexes also include oxo complexes. Suitable oxo tungsten complexes include tungstate and tungsten oxide complexes. Suitable tungstate complexes include ammonium tungstate, calcium tungstate, sodium tungstate dihydrate, and tungstic acid. Suitable tungsten oxides include tungsten (IV) oxide and tungsten (VI) oxide. Suitable oxo molybdenum complexes include molybdate, molybdenum oxide, and molybdenyl complexes. Suitable molybdate complexes include ammonium molybdate and its hydrates, sodium molybdate and its hydrates, and potassium molybdate and its hydrates. Suitable molybdenum oxides include molybdenum (VI) oxide, molybdenum (VI) oxide, and molybdic acid. Suitable molybdenyl complexes include, for example, molybdenyl acetylacetonate. Other suitable tungsten and molybdenum complexes include hydroxo derivatives derived from, for example, glycerol, tartaric acid, and sugars.

[0949] A wide variety of other anti-angiogenic factors may also be utilized within the context of the present invention. Representative examples include, but are not limited to, platelet factor 4; protamine sulphate; sulphated chitin derivatives (prepared from queen crab shells), (Murata et al., Cancer Res. 51:22-26, (1991)); Sulphated Polysaccharide Peptidoglycan Complex (SP-PG) (the function of this compound may be enhanced by the presence of steroids such as estrogen, and tamoxifen citrate); Staurosporine; modulators of matrix metabolism, including for example, proline analogs, cishydroxyproline, d,L-3,4-dehydroproline, Thiaproline, alpha,alpha-dipyridyl, aminopropionitrile fumarate; 4-propyl-5-(4-pyridinyl)-2(3H)-oxazolone; Methotrexate; Mitoxantrone; Heparin; Interferons; 2 Macroglobulin-serum; ChIMP-3 (Pavloff et al., J. Bio. Chem. 267:17321-17326, (1992)); Chymostatin (Tomkinson et al., Biochem J. 286:475-480, (1992)); Cyclodextrin Tetradecasulfate; Eponemycin; Camptothecin; Fumagillin (Ingber et al., Nature 348:555-557, (1990)); Gold Sodium Thiomalate (“GST”; Matsubara and Ziff, J. Clin. Invest. 79:1440-1446, (1987)); anticollagenase-serum; alpha2-antiplasmin (Holmes et al., J. Biol. Chem. 262(4):1659-1664, (1987)); Bisantrene (National Cancer Institute); Lobenzarit disodium (N-(2)-carboxyphenyl-4 -chloroanthronilic acid disodium or “CCA”; (Takeuchi et al., Agents Actions 36:312-316, (1992)); and metalloproteinase inhibitors such as BB94.

[0950] Additional anti-angiogenic factors that may also be utilized within the context of the present invention include Thalidomide, (Celgene, Warren, N.J.); Angiostatic steroid; AGM-1470 (H. Brem and J. Folkman J Pediatr. Surg. 28:445-51 (1993)); an integrin alpha v beta 3 antagonist (C. Storgard et al., J Clin. Invest. 103:47-54 (1999)); carboxynaminolmidazole; Carboxyamidotriazole (CAI) (National Cancer Institute, Bethesda, Md.); Conbretastatin A-4 (CA4P) (OXiGENE, Boston, Mass.); Squalamine (Magainin Pharmaceuticals, Plymouth Meeting, Pa.); TNP-470, (Tap Pharmaceuticals, Deerfield, Ill.); ZD-0101 AstraZeneca (London, UK); APRA (CT2584); Benefin, Byrostatin-1 (SC339555); CGP-41251 (PKC 412); CM101; Dexrazoxane (ICRF187); DMXAA; Endostatin; Flavopridiol; Genestein; GTE; ImmTher; Iressa (ZD1839); Octreotide (Somatostatin); Panretin; Penacillamine; Photopoint; PI-88; Prinomastat (AG-3340) Purlytin; Suradista (FCE26644); Tamoxifen (Nolvadex); Tazarotene; Tetrathiomolybdate; Xeloda (Capecitabine); and 5-Fluorouracil.

[0951] Anti-angiogenic agents that may be administed in combination with the compounds of the invention may work through a variety of mechanisms including, but not limited to, inhibiting proteolysis of the extracellular matrix, blocking the function of endothelial cell-extracellular matrix adhesion molecules, by antagonizing the function of angiogenesis inducers such as growth factors, and inhibiting integrin receptors expressed on proliferating endothelial cells. Examples of anti-angiogenic inhibitors that interfere with extracellular matrix proteolysis and which may be administered in combination with the compositons of the invention include, but are not Imited to, AG-3340 (Agouron, La Jolla, Calif.), BAY-12-9566 (Bayer, West Haven, Conn.), BMS-275291 (Bristol Myers Squibb, Princeton, N.J.), CGS-27032A (Novartis, East Hanover, N.J.), Marimastat (British Biotech, Oxford, UK), and Metastat (Aeterna, St-Foy, Quebec). Examples of anti-angiogenic inhibitors that act by blocking the function of endothelial cell-extracellular matrix adhesion molecules and which may be administered in combination with the compositons of the invention include, but are not Imited to, EMD-121974 (Merck KcgaA Darmstadt, Germany) and Vitaxin (Ixsys, La Jolla, Calif./Medimmune, Gaithersburg, Md.). Examples of anti-angiogenic agents that act by directly antagonizing or inhibiting angiogenesis inducers and which may be administered in combination with the compositons of the invention include, but are not limited to, Angiozyme (Ribozyme, Boulder, Colo.), Anti-VEGF antibody (Genentech, S. San Francisco, Calif.), PTK-787/ZK-225846 (Novartis, Basel, Switzerland), SU-101 (Sugen, S. San Francisco, Calif.), SU-5416 (Sugen, Pharmacia Upjohn, Bridgewater, N.J.), and SU-6668 (Sugen). Other anti-angiogenic agents act to indirectly inhibit angiogenesis. Examples of indirect inhibitors of angiogenesis which may be administered in combination with the compositons of the invention include, but are not limited to, IM-862 (Cytran, Kirkland, Wash.), Interferon-alpha, IL-12 (Roche, Nutley, N.J.), and Pentosan polysulfate (Georgetown University, Washington, D.C.).

[0952] In particular embodiments, the use of compositions of the invention in combination with anti-angiogenic agents is contemplated for the treatment, prevention, and/or amelioration of an autoimmune disease, such as for example, an autoimmune disease described herein.

[0953] In a particular embodiment, the use of compositions of the invention in combination with anti-angiogenic agents is contemplated for the treatment, prevention, and/or amelioration of arthritis. In a more particular embodiment, the use of compositions of the invention in combination with anti-angiogenic agents is contemplated for the treatment, prevention, and/or amelioration of rheumatoid arthritis.

[0954] In another embodiment, the polynucleotides encoding a polypeptide of the present invention are administered in combination with an angiogenic protein, or polynucleotides encoding an angiogenic protein. Examples of angiogenic proteins that may be administered with the compositions of the invention include, but are not limited to, acidic and basic fibroblast growth factors, VEGF-1, VEGF-2, VEGF-3, epidermal growth factor alpha and beta, platelet-derived endothelial cell growth factor, platelet-derived growth factor, tumor necrosis factor alpha, hepatocyte growth factor, insulin-like growth factor, colony stimulating factor, macrophage colony stimulating factor, granulocyte/macrophage colony stimulating factor, and nitric oxide synthase.

[0955] In additional embodiments, compositions of the invention are administered in combination with a chemotherapeutic agent. Chemotherapeutic agents that may be administered with the Therapeutics of the invention include, but are not limited to alkylating agents such as nitrogen mustards (for example, Mechlorethamine, cyclophosphamide, Cyclophosphamide Ifosfamide, Melphalan (L-sarcolysin), and Chlorambucil), ethylenimines and methylmelamines (for example, Hexamethylmelamine and Thiotepa), alkyl sulfonates (for example, Busulfan), nitrosoureas (for example, Carmustine (BCNU), Lomustine (CCNU), Semustine (methyl-CCNU), and Streptozocin (streptozotocin)), triazenes (for example, Dacarbazine (DTIC; dimethyltriazenoimidazolecarboxamide)), folic-acid analogs (for example, Methotrexate (amethopterin)), pyrimidine analogs (for example, Fluorouacil (5-fluorouracil; 5-FU), Floxuridine (fluorodeoxyuridine; FudR), and Cytarabine (cytosine arabinoside)), purine analogs and related inhibitors (for example, Mercaptopurine (6-mercaptopurine; 6-MP), Thioguanine (6-thioguanine; TG), and Pentostatin (2′-deoxycofomycin)), vinca alkaloids (for example, Vinblastine (VLB, vinblastine sulfate)) and Vincristine (vincristine sulfate)), epipodophyllotoxins (for example, Etoposide and Teniposide), antibiotics (for example, Dactinomycin (actinomycin D), Daunorubicin (daunomycin; rubidomycin), Doxorubicin, Bleomycin, Plicamycin (mithramycin), and Mitomycin (mitomycin C), enzymes (for example, L-Asparaginase), biological response modifiers (for example, Interferon-alpha and interferon-alpha-2b), platinum coordination compounds (for example, Cisplatin (cis-DDP) and Carboplatin), anthracenedione (Mitoxantrone), substituted ureas (for example, Hydroxyurea), methylhydrazine derivatives (for example, Procarbazine (N-methylhydrazine; MIH), adrenocorticosteroids (for example, Prednisone), progestins (for example, Hydroxyprogesterone caproate, Medroxyprogesterone, Medroxyprogesterone acetate, and Megestrol acetate), estrogens (for example, Diethylstilbestrol (DES), Diethylstilbestrol diphosphate, Estradiol, and Ethinyl estradiol), antiestrogens (for example, Tamoxifen), androgens (Testosterone proprionate, and Fluoxymesterone), antiandrogens (for example, Flutamide), gonadotropin-releasing horomone analogs (for example, Leuprolide), other hormones and hormone analogs (for example, methyltestosterone, estramustine, estramustine phosphate sodium, chlorotrianisene, and testolactone), and others (for example, dicarbazine, glutamic acid, and mitotane).

[0956] In one embodiment, the compositions of the invention are administered in combination with one or more of the following drugs: infliximab (also known as Remicade™ Centocor, Inc.), Trocade (Roche, RO-32-3555), Leflunomide (also known as Arava™ from Hoechst Marion Roussel), Kineret™ (an IL-1 Receptor antagonist also known as Anakinra from Amgen, Inc.)

[0957] In a specific embodiment, compositions of the invention are administered in combination with CHOP (cyclophosphamide, doxorubicin, vincristine, and prednisone) or combination of one or more of the components of CHOP. In one embodiment, the compositions of the invention are administered in combination with anti-CD20 antibodies, human monoclonal anti-CD20 antibodies. In another embodiment, the compositions of the invention are administered in combination with anti-CD20 antibodies and CHOP, or anti-CD20 antibodies and any combination of one or more of the components of CHOP, particularly cyclophosphamide and/or prednisone. In a specific embodiment, compositions of the invention are administered in combination with Rituximab. In a further embodiment, compositions of the invention are administered with Rituximab and CHOP, or Rituximab and any combination of one or more of the components of CHOP, particularly cyclophosphamide and/or prednisone. In a specific embodiment, compositions of the invention are administered in combination with tositumomab. In a further embodiment, compositions of the invention are administered with tositumomab and CHOP, or tositumomab and any combination of one or more of the components of CHOP, particularly cyclophosphamide and/or prednisone. The anti-CD20 antibodies may optionally be associated with radioisotopes, toxins or cytotoxic prodrugs.

[0958] In another specific embodiment, the compositions of the invention are administered in combination Zevalin™. In a further embodiment, compositions of the invention are administered with Zevalin™ and CHOP, or Zevalin™ and any combination of one or more of the components of CHOP, particularly cyclophosphamide and/or prednisone. Zevalin™ may be associated with one or more radisotopes. Particularly preferred isotopes are ⁹⁰Y and ¹¹¹In.

[0959] In an additional embodiment, the Therapeutics of the invention are administered in combination with cytokines. Cytokines that may be administered with the Therapeutics of the invention include, but are not limited to, IL2, IL3, IL4, IL5, IL6, IL7, IL10, IL12, IL13, IL15, anti-CD40, CD40L, IFN-gamma and TNF-alpha. In another embodiment, Therapeutics of the invention may be administered with any interleukin, including, but not limited to, IL-1alpha, IL-1beta, IL-2, IL-3, IL-4, IL-5, IL-6, IL-7, IL-8, IL-9, IL-10, IL11, IL-12, IL-13, IL-14, IL-15, IL-16, IL-17, IL-18, IL-19, IL-20, and IL-21.

[0960] In one embodiment, the Therapeutics of the invention are administered in combination with members of the TNF family. TNF, TNF-related or TNF-like molecules that may be administered with the Therapeutics of the invention include, but are not limited to, soluble forms of TNF-alpha, lymphotoxin-alpha (LT-alpha, also known as TNF-beta), LT-beta (found in complex heterotrimer LT-alpha2-beta), OPGL, FasL, CD27L, CD30L, CD40L, 4-IBBL, DcR3, OX40L, TNF-gamma (International Publication No. WO 96/14328), AIM-I (International Publication No. WO 97/33899), endokine-alpha (International Publication No. WO 98/07880), OPG, and neutrokine-alpha (International Publication No. WO 98/18921, OX40, and nerve growth factor (NGF), and soluble forms of Fas, CD30, CD27, CD40 and 4-IBB, TR2 (International Publication No. WO 96/34095), DR3 (International Publication No. WO 97/33904), DR4 (International Publication No. WO 98/32856), TR5 (International Publication No. WO 98/30693), TRANK, TR9 (International Publication No. WO 98/56892),TR10 (International Publication No. WO 98/54202), 312C2 (International Publication No. WO 98/06842), and TR12, and soluble forms CD154, CD70, and CD153.

[0961] In an additional embodiment, the Therapeutics of the invention are administered in combination with angiogenic proteins. Angiogenic proteins that may be administered with the Therapeutics of the invention include, but are not limited to, Glioma Derived Growth Factor (GDGF), as disclosed in European Patent Number EP-399816; Platelet Derived Growth Factor-A (PDGF-A), as disclosed in European Patent Number EP-682110; Platelet Derived Growth Factor-B (PDGF-B), as disclosed in European Patent Number EP-282317; Placental Growth Factor (PIGF), as disclosed in International Publication Number WO 92/06194; Placental Growth Factor-2 (PlGF-2), as disclosed in Hauser et al., Growth Factors, 4:259-268 (1993); Vascular Endothelial Growth Factor (VEGF), as disclosed in International Publication Number WO 90/13649; Vascular Endothelial Growth Factor-A (VEGF-A), as disclosed in European Patent Number EP-506477; Vascular Endothelial Growth Factor-2 (VEGF-2), as disclosed in International Publication Number WO 96/39515; Vascular Endothelial Growth Factor B (VEGF-3); Vascular Endothelial Growth Factor B-186 (VEGF-B186), as disclosed in International Publication Number WO 96/26736; Vascular Endothelial Growth Factor-D (VEGF-D), as disclosed in International Publication Number WO 98/02543; Vascular Endothelial Growth Factor-D (VEGF-D), as disclosed in International Publication Number WO 98/07832; and Vascular Endothelial Growth Factor-E (VEGF-E), as disclosed in German Patent Number DE19639601. The above mentioned references are herein incorporated by reference in their entireties.

[0962] In an additional embodiment, the Therapeutics of the invention are administered in combination with Fibroblast Growth Factors. Fibroblast Growth Factors that may be administered with the Therapeutics of the invention include, but are not limited to, FGF-1, FGF-2, FGF-3, FGF-4, FGF-5, FGF-6, FGF-7, FGF-8, FGF-9, FGF-10, FGF-11, FGF-12, FGF-13, FGF-14, and FGF-15.

[0963] In an additional embodiment, the Therapeutics of the invention are administered in combination with hematopoietic growth factors. Hematopoietic growth factors that may be administered with the Therapeutics of the invention include, but are not limited to, granulocyte macrophage colony stimulating factor (GM-CSF) (sargramostim, LEUKINE™, PROKINE™), granulocyte colony stimulating factor (G-CSF) (filgrastim, NEUPOGEN™), macrophage colony stimulating factor (M-CSF, CSF-1) erythropoietin (epoetin alfa, EPOGEN™, PROCRIT™), stem cell factor (SCF, c-kit ligand, steel factor), megakaryocyte colony stimulating factor, PIXY321 (a GMCSF/IL-3 fusion protein), interleukins, especially any one or more of IL-1 through IL-12, interferon-gamma, or thrombopoietin.

[0964] In certain embodiments, Therapeutics of the present invention are administered in combination with adrenergic blockers, such as, for example, acebutolol, atenolol, betaxolol, bisoprolol, carteolol, labetalol, metoprolol, nadolol, oxprenolol, penbutolol, pindolol, propranolol, sotalol, and timolol.

[0965] In another embodiment, the Therapeutics of the invention are administered in combination with an antiarrhythmic drug (e.g., adenosine, amidoarone, bretylium, digitalis, digoxin, digitoxin, diliazem, disopyramide, esmolol, flecainide, lidocaine, mexiletine, moricizine, phenytoin, procainamide, N-acetyl procainamide, propafenone, propranolol, quinidine, sotalol, tocainide, and verapamil).

[0966] In another embodiment, the Therapeutics of the invention are administered in combination with diuretic agents, such as carbonic anhydrase-inhibiting agents (e.g., acetazolamide, dichlorphenamide, and methazolamide), osmotic diuretics (e.g., glycerin, isosorbide, mannitol, and urea), diuretics that inhibit Na⁺—K⁺-2Cl⁻ symport (e.g., furosemide, bumetanide, azosemide, piretanide, tripamide, ethacrynic acid, muzolimine, and torsemide), thiazide and thiazide-like diuretics (e.g., bendroflumethiazide, benzthiazide, chlorothiazide, hydrochlorothiazide, hydroflumethiazide, methyclothiazide, polythiazide, trichormethiazide, chlorthalidone, indapamide, metolazone, and quinethazone), potassium sparing diuretics (e.g., amiloride and triamterene), and mineralcorticoid receptor antagonists (e.g., spironolactone, canrenone, and potassium canrenoate).

[0967] In one embodiment, the Therapeutics of the invention are administered in combination with treatments for endocrine and/or hormone imbalance disorders. Treatments for endocrine and/or hormone imbalance disorders include, but are not limited to, ¹²⁷I, radioactive isotopes of iodine such as ¹³¹I and ¹²³I; recombinant growth hormone, such as HUMATROPE™ (recombinant somatropin); growth hormone analogs such as PROTROPIN™ (somatrem); dopamine agonists such as PARLODEL™ (bromocriptine); somatostatin analogs such as SANDOSTATIN™ (octreotide); gonadotropin preparations such as PREGNYL™, A.P.L.™ and PROFASI™ (chorionic gonadotropin (CG)), PERGONAL™ (menotropins), and METRODIN™ (urofollitropin (uFSH)); synthetic human gonadotropin releasing hormone preparations such as FACTREL™ and LUTREPULSE™ (gonadorelin hydrochloride); synthetic gonadotropin agonists such as LUPRON™ (leuprolide acetate), SUPPRELIN™ (histrelin acetate), SYNAREL™ (nafarelin acetate), and ZOLADEX™ (goserelin acetate); synthetic preparations of thyrotropin-releasing hormone such as RELEFACT TRH™ and THYPINONE™ (protirelin); recombinant human TSH such as THYROGEN™; synthetic preparations of the sodium salts of the natural isomers of thyroid hormones such as L-T₄™, SYNTHROID™ and LEVOTHROID™ (levothyroxine sodium), L-T₃™, CYTOMEL™ and TRIOSTAT™ (liothyroine sodium), and THYROLAR™ (liotrix); antithyroid compounds such as 6-n-propylthiouracil (propylthiouracil), 1-methyl-2-mercaptoimidazole and TAPAZOLE™ (methimazole), NEO-MERCAZOLE™ (carbimazole); beta-adrenergic receptor antagonists such as propranolol and esmolol; Ca²⁺ channel blockers; dexamethasone and iodinated radiological contrast agents such as TELEPAQUE™ (iopanoic acid) and ORAGRAFIN™ (sodium ipodate).

[0968] Additional treatments for endocrine and/or hormone imbalance disorders include, but are not limited to, estrogens or congugated estrogens such as ESTRACE™ (estradiol), ESTINYL™ (ethinyl estradiol), PREMARIN™, ESTRATAB™, ORTHO-EST™, OGEN™ and estropipate (estrone), ESTROVIS™ (quinestrol), ESTRADERM™ (estradiol), DELESTROGEN™ and VALERGEN™ (estradiol valerate), DEPO-ESTRADIOL CYPIONATE™ and ESTROJECT LA™ (estradiol cypionate); antiestrogens such as NOLVADEX™ (tamoxifen), SEROPHENE™ and CLOMID™ (clomiphene); progestins such as DURALUTIN™ (hydroxyprogesterone caproate), MPA™ and DEPO-PROVERA™ (medroxyprogesterone acetate), PROVERA™ and CYCRIN™ (MPA), MEGACE™ (megestrol acetate), NORLUTIN™ (norethindrone), and NORLUTATE™ and AYGESTIN™ (norethindrone acetate); progesterone implants such as NORPLANT SYSTEM™ (subdermal implants of norgestrel); antiprogestins such as RU 486™ (mifepristone); hormonal contraceptives such as ENOVID™ (norethynodrel plus mestranol), PROGESTASERT™ (intrauterine device that releases progesterone), LOESTRIN™, BREVICON™, MODICON™, GENORA™, NELONA™, NORINYL™, OVACON-35™ and OVACON-50™ (ethinyl estradiol/norethindrone), LEVLEN™, NORDETTE™, TRI-LEVLEN™ and TRIPHASIL-21™ (ethinyl estradiol/levonorgestrel) LO/OVRAL™ and OVRAL™ (ethinyl estradiol/norgestrel), DEMULEN™ (ethinyl estradiol/ethynodiol diacetate), NORINYL™, ORTHO-NOVUM™, NORETHIN™, GENORA™, and NELOVA™ (norethindrone/mestranol), DESOGEN™ and ORTHO-CEPT™ (ethinyl estradiol/desogestrel), ORTHO-CYCLEN™ and ORTHO-TRICYCLEN™ (ethinyl estradiol/norgestimate), MICRONOR™ and NOR-QD™ (norethindrone), and OVRETTE™ (norgestrel).

[0969] Additional treatments for endocrine and/or hormone imbalance disorders include, but are not limited to, testosterone esters such as methenolone acetate and testosterone undecanoate; parenteral and oral androgens such as TESTOJECT-50™ (testosterone), TESTEX™ (testosterone propionate), DELATESTRYL™ (testosterone enanthate), DEPO-TESTOSTERONE™ (testosterone cypionate), DANOCRINE™ (danazol), HALOTESTIN™ (fluoxymesterone), ORETON METHYL™, TESTRED™ and VIRILON™ (methyltestosterone), and OXANDRIN™ (oxandrolone); testosterone transdermal systems such as TESTODERM™; androgen receptor antagonist and 5-alpha-reductase inhibitors such as ANDROCUR™ (cyproterone acetate), EULEXIN™ (flutamide), and PROSCAR™ (finasteride); adrenocorticotropic hormone preparations such as CORTROSYN™ (cosyntropin); adrenocortical steroids and their synthetic analogs such as ACLOVATE™ (alclometasone dipropionate), CYCLOCORT™ (amcinonide), BECLOVENT™ and VANCERIL™ (beclomethasone dipropionate), CELESTONE™ (betamethasone), BENISONE™ and UTICORT™ (betamethasone benzoate), DIPROSONE™ (betamethasone dipropionate), CELESTONE PHOSPHATE™ (betamethasone sodium phosphate), CELESTONE SOLUSPAN™ (betarnethasone sodium phosphate and acetate), BETA-VAL™ and VALISONE™ (betamethasone valerate), TEMOVATE™ (clobetasol propionate), CLODERM™ (clocortolone pivalate), CORTEF™ and HYDROCORTONE™ (cortisol (hydrocortisone)), HYDROCORTONE ACETATE™ (cortisol (hydrocortisone) acetate), LOCOID™ (cortisol (hydrocortisone) butyrate), HYDROCORTONE PHOSPHATE™ (cortisol (hydrocortisone) sodium phosphate), A-HYDROCORT™ and SOLU CORTEF™ (cortisol (hydrocortisone) sodium succinate), WESTCORT™ (cortisol (hydrocortisone) valerate), CORTISONE ACETATE™ (cortisone acetate), DESOWEN™ and TRIDESILON™ (desonide), TOPICORT™ (desoximetasone), DECADRON™ (dexamethasone), DECADRON LA™ (dexamethasone acetate), DECADRON PHOSPHATE™ and HEXADROL PHOSPHATE™ (dexamethasone sodium phosphate), FLORONE™ and MAXIFLOR™ (diflorasone diacetate), FLORINEF ACETATE™ (fludrocortisone acetate), AEROBID™ and NASALIDE™ (flunisolide), FLUONID™ and SYNALAR™ (fluocinolone acetonide), LIDEX™ (fluocinonide), FLUOR-OP™ and FML™ (fluorometholone), CORDRAN™ (flurandrenolide), HALOG™ (halcinonide), HMS LIZUIFILM™ (medrysone), MEDROL™ (methylprednisolone), DEPO-MEDROL™ and MEDROL ACETATE™ (methylprednisone acetate), A-METHAPRED™ and SOLUMEDROL™ (methylprednisolone sodium succinate), ELOCON™ (mometasone furoate), HALDRONE™ (paramethasone acetate), DELTA-CORTEF™ (prednisolone), ECONOPRED™ (prednisolone acetate), HYDELTRASOL™ (prednisolone sodium phosphate), HYDELTRA-T.B.A™ (prednisolone tebutate), DELTASONE™ (prednisone), ARISTOCORT™ and KENACORT™ (triamcinolone), KENALOG™ (triamcinolone acetonide), ARISTOCORT™ and KENACORT DIACETATE™ (triamcinolone diacetate), and ARISTOSPAN™ (triamcinolone hexacetonide); inhibitors of biosynthesis and action of adrenocortical steroids such as CYTADREN™ (aminoglutethimide), NIZORAL™ (ketoconazole), MODRASTANE™ (trilostane), and METOPIRONE™ (metyrapone); bovine, porcine or human insulin or mixtures thereof; insulin analogs; recombinant human insulin such as HUMULN™ and NOVOLIN™; oral hypoglycemic agents such as ORAMIDE™ and ORINASE™ (tolbutarnide), DIABINESE™ (chlorpropamide), TOLAMIDE™ and TOLINASE™ (tolazamide), DYMELOR™ (acetohexamide), glibenclamide, MICRONASE™, DIBETA™ and GLYNASE™ (glyburide), GLUCOTROL™ (glipizide), and DIAMICRON™ (gliclazide), GLUCOPHAGE™ (metformin), ciglitazone, pioglitazone, and alpha-glucosidase inhibitors; bovine or porcine glucagon; somatostatins such as SANDOSTATIN™ (octreotide); and diazoxides such as PROGLYCEM™ (diazoxide).

[0970] In one embodiment, the Therapeutics of the invention are administered in combination with treatments for uterine motility disorders. Treatments for uterine motility disorders include, but are not limited to, estrogen drugs such as conjugated estrogens (e.g., PREMARIN® and ESTRATAB®), estradiols (e.g., CLIMARA® and ALORA®), estropipate, and chlorotrianisene; progestin drugs (e.g., AMEN® (medroxyprogesterone), MICRONOR® (norethidrone acetate), PROMETRIUM® progesterone, and megestrol acetate); and estrogen/progesterone combination therapies such as, for example, conjugated estrogens/medroxyprogesterone (e.g., PREMPRO™ and PREMPHASE®) and norethindrone acetate/ethinyl estsradiol (e.g., FEMHRT™).

[0971] In an additional embodiment, the Therapeutics of the invention are administered in combination with drugs effective in treating iron deficiency and hypochromic anemias, including but not limited to, ferrous sulfate (iron sulfate, FEOSOL™), ferrous fumarate (e.g., FEOSTAT™), ferrous gluconate (e.g., FERGON™), polysaccharide-iron complex (e.g., NIFEREX™), iron dextran injection (e.g., INFED™), cupric sulfate, pyroxidine, riboflavin, Vitamin B₁₂, cyancobalamin injection (e.g., REDISOL™, RUBRAMIN PC™), hydroxocobalamin, folic acid (e.g., FOLVITE™), leucovorin (folinic acid, 5-CHOH4PteGlu, citrovorum factor) or WELLCOVORIN (Calciurn salt of leucovorin), transferrin or ferritin.

[0972] In certain embodiments, the Therapeutics of the invention are administered in combination with agents used to treat psychiatric disorders. Psychiatric drugs that may be administered with the Therapeutics of the invention include, but are not limited to, antipsychotic agents (e.g., chlorpromazine, chlorprothixene, clozapine, fluphenazine, haloperidol, loxapine, mesoridazine, molindone, olanzapine, perphenazine, pimozide, quetiapine, risperidone, thioridazine, thiothixene, trifluoperazine, and triflupromazine), antimanic agents (e.g., carbamazepine, divalproex sodium, lithium carbonate, and lithium citrate), antidepressants (e.g., amitriptyline, amoxapine, bupropion, citalopram, clomipramine, desipramine, doxepin, fluvoxamine, fluoxetine, imipramine, isocarboxazid, maprotiline, mirtazapine, nefazodone, nortriptyline, paroxetine, phenelzine, protriptyline, sertraline, tranylcypromine, trazodone, trimipramine, and venlafaxine), antianxiety agents (e.g., alprazolam, buspirone, chlordiazepoxide, clorazepate, diazepam, halazepam, lorazepam, oxazepam, and prazepam), and stimulants (e.g., d-amphetamine, methylphenidate, and pemoline).

[0973] In other embodiments, the Therapeutics of the invention are administered in combination with agents used to treat neurological disorders. Neurological agents that may be administered with the Therapeutics of the invention include, but are not limited to, antiepileptic agents (e.g., carbamazepine, clonazepam, ethosuximide, phenobarbital, phenytoin, primidone, valproic acid, divalproex sodium, felbamate, gabapentin, lamotrigine, levetiracetam, oxcarbazepine, tiagabine, topiramate, zonisamide, diazepam, lorazepam, and clonazepam), antiparkinsonian agents (e.g., levodopalcarbidopa, selegiline; amantidine, bromocriptine, pergolide, ropinirole, pramipexole, benztropine; biperiden; ethopropazine; procyclidine; trihexyphenidyl, tolcapone), and ALS therapeutics (e.g. riluzole).

[0974] In another embodiment, Therapeutics of the invention are administered in combination with vasodilating agents and/or calcium channel blocking agents. Vasodilating agents that may be administered with the Therapeutics of the invention include, but are not limited to, Angiotensin Converting Enzyme (ACE) inhibitors (e.g., papaverine, isoxsuprine, benazepril, captopril, cilazapril, enalapril, enalaprilat, fosinopril, lisinopril, moexipril, perindopril, quinapril, ramipril, spirapril, trandolapril, and nylidrin), and nitrates (e.g., isosorbide dinitrate, isosorbide mononitrate, and nitroglycerin). Examples of calcium channel blocking agents that may be administered in combination with the Therapeutics of the invention include, but are not limited to amlodipine, bepridil, diltiazem, felodipine, flunarizine, isradipine, nicardipine, nifedipine, nimodipine, and verapamil.

[0975] In certain embodiments, the Therapeutics of the invention are administered in combination with treatments for gastrointestinal disorders. Treatments for gastrointestinal disorders that may be administered with the Therapeutic of the invention include, but are not limited to, H₂ histamine receptor antagonists (e.g., TAGAMET™ (cimetidine), ZANTAC™ (ranitidine), PEPCID™ (famotidine), and AXID™ (nizatidine)); inhibitors of H⁺, K⁺ ATPase (e.g., PREVACID™ (lansoprazole) and PRILOSEC™ (omeprazole)); Bismuth compounds (e.g., PEPTO-BISMOL™ (bismuth subsalicylate) and DE-NOL™ (bismuth subcitrate)); various antacids; sucralfate; prostaglandin analogs (e.g. CYTOTEC™ (misoprostol)); muscarinic cholinergic antagonists; laxatives (e.g., surfactant laxatives, stimulant laxatives, saline and osmotic laxatives); antidiarrheal agents (e.g., LOMOTIL™ (diphenoxylate), MOTOFEN™ (diphenoxin), and IMODIUM™ (loperamide hydrochloride)), synthetic analogs of somatostatin such as SANDOSTATIN™ (octreotide), antiemetic agents (e.g., ZOFRAN™ (ondansetron), KYTRIL™ (granisetron hydrochloride), tropisetron, dolasetron, metoclopramide, chlorpromazine, perphenazine, prochlorperazine, promethazine, thiethylperazine, triflupromazine, domperidone, haloperidol, droperidol, trimethobenzamide, dexamethasone, methylprednisolone, dronabinol, and nabilone); D2 antagonists (e.g., metoclopramide, trimethobenzamide and chlorpromazine); bile salts; chenodeoxycholic acid; ursodeoxycholic acid; and pancreatic enzyme preparations such as pancreatin and pancrelipase.

[0976] In additional embodiments, the Therapeutics of the invention are administered in combination with other therapeutic or prophylactic regimens, such as, for example, radiation therapy.

### EXAMPLE 14

### Method of Treating Decreased Levels of the Polypeptide

[0977] The present invention relates to a method for treating an individual in need of an increased level of a polypeptide of the invention in the body comprising administering to such an individual a composition comprising a therapeutically effective amount of an agonist of the invention (including polypeptides of the invention). Moreover, it will be appreciated that conditions caused by a decrease in the standard or normal expression level of a polypeptide of the present invention in an individual can be treated by administering the agonist or antagonist of the present invention. Thus, the invention also provides a method of treatment of an individual in need of an increased level of the polypeptide comprising administering to such an individual a Therapeutic comprising an amount of the agonist or antagonist to increase the activity level of the polypeptide in such an individual.

[0978] For example, a patient with decreased levels of a polypeptide receives a daily dose 0.1-100 ug/kg of the agonist or antagonist for six consecutive days. The exact details of the dosing scheme, based on administration and formulation, are provided in Example 13.

### EXAMPLE 15

### Method of Treating Increased Levels of the Polypeptide

[0979] The present invention also relates to a method of treating an individual in need of a decreased level of a polypeptide of the invention in the body comprising administering to such an individual a composition comprising a therapeutically effective amount of an antagonist of the invention (including polypeptides and antibodies of the invention).

[0980] In one example, antisense technology is used to inhibit production of a polypeptide of the present invention. This technology is one example of a method of decreasing levels of a polypeptide, due to a variety of etiologies, such as cancer.

[0981] For example, a patient diagnosed with abnormally increased levels of a polypeptide is administered intravenously antisense polynucleotides at 0.5, 1.0, 1.5, 2.0 and 3.0 mg/kg day for 21 days. This treatment is repeated after a 7-day rest period if the treatment was well tolerated. The antisense polynucleotides of the present invention can be formulated using techniques and formulations described herein (e.g. see Example 13), or otherwise known in the art.

### EXAMPLE 16

### Method of Treatment Using Gene Therapy—Ex Vivo

[0982] One method of gene therapy transplants fibroblasts, which are capable of expressing a polypeptide, onto a patient. Generally, fibroblasts are obtained from a subject by skin biopsy. The resulting tissue is placed in tissue-culture medium and separated into small pieces. Small chunks of the tissue are placed on a wet surface of a tissue culture flask, approximately ten pieces are placed in each flask. The flask is turned upside down, closed tight and left at room temperature over night. After 24 hours at room temperature, the flask is inverted and the chunks of tissue remain fixed to the bottom of the flask and fresh media (e.g., Ham's F12 media, with 10% FBS, penicillin and streptomycin) is added. The flasks are then incubated at 37 degree C. for approximately one week.

[0983] At this time, fresh media is added and subsequently changed every several days. After an additional two weeks in culture, a monolayer of fibroblasts emerge. The monolayer is trypsinized and scaled into larger flasks.

[0984] pMV-7 (Kirschmeier, P. T. et al., DNA, 7:219-25 (1988)), flanked by the long terminal repeats of the Moloney murine sarcoma virus, is digested with EcoRI and HindIII and subsequently treated with calf intestinal phosphatase. The linear vector is fractionated on agarose gel and purified, using glass beads.

[0985] The cDNA encoding a polypeptide of the present invention can be amplified using PCR primers which correspond to the 5′ and 3′ end sequences respectively as set forth in Example 1 using primers and having appropriate restriction sites and initiation/stop codons, if necessary. Preferably, the 5′ primer contains an EcoRI site and the 3′ primer includes a HindIII site. Equal quantities of the Moloney murine sarcoma virus linear backbone and the amplified EcoRI and HindIlI fragment are added together, in the presence of T4 DNA ligase. The resulting mixture is maintained under conditions appropriate for ligation of the two fragments. The ligation mixture is then used to transform bacteria HB101, which are then plated onto agar containing kanamycin for the purpose of confirming that the vector has the gene of interest properly inserted.

[0986] The amphotropic pA317 or GP+am12 packaging cells are grown in tissue culture to confluent density in Dulbecco's Modified Eagles Medium (DMEM) with 10% calf serum (CS), penicillin and streptomycin. The MSV vector containing the gene is then added to the media and the packaging cells transduced with the vector. The packaging cells now produce infectious viral particles containing the gene (the packaging cells are now referred to as producer cells).

[0987] Fresh media is added to the transduced producer cells, and subsequently, the media is harvested from a 10 cm plate of confluent producer cells. The spent media, containing the infectious viral particles, is filtered through a millipore filter to remove detached producer cells and this media is then used to infect fibroblast cells. Media is removed from a sub-confluent plate of fibroblasts and quickly replaced with the media from the producer cells. This media is removed and replaced with fresh media. If the titer of virus is high, then virtually all fibroblasts will be infected and no selection is required. If the titer is very low, then it is necessary to use a retroviral vector that has a selectable marker, such as neo or his. Once the fibroblasts have been efficiently infected, the fibroblasts are analyzed to determine whether protein is produced.

[0988] The engineered fibroblasts are then transplanted onto the host, either alone or after having been grown to confluence on cytodex 3 microcarrier beads.

### EXAMPLE 17

### Gene Therapy Using Endogenous Genes Corresponding To Polynucleotides of the Invention

[0989] Another method of gene therapy according to the present invention involves operably associating the endogenous polynucleotide sequence of the invention with a promoter via homologous recombination as described, for example, in U.S. Pat. No. 5,641,670, issued Jun. 24, 1997; International Publication No. WO 96/29411, published Sep. 26, 1996; International Publication NO: WO 94/12650, published Aug. 4, 1994; Koller et al., Proc. Natl. Acad. Sci. USA, 86:8932-8935 (1989); and Zijlstra et al., Nature, 342:435-438 (1989). This method involves the activation of a gene which is present in the target cells, but which is not expressed in the cells, or is expressed at a lower level than desired.

[0990] Polynucleotide constructs are made which contain a promoter and targeting sequences, which are homologous to the 5′ non-coding sequence of endogenous polynucleotide sequence, flanking the promoter. The targeting sequence will be sufficiently near the 5′ end of the polynucleotide sequence so the promoter will be operably linked to the endogenous sequence upon homologous recombination. The promoter and the targeting sequences can be amplified using PCR. Preferably, the amplified promoter contains distinct restriction enzyme sites on the 5′ and 3′ ends. Preferably, the 3′ end of the first targeting sequence contains the same restriction enzyme site as the 5′ end of the amplified promoter and the 5′ end of the second targeting sequence contains the same restriction site as the 3′ end of the amplified promoter.

[0991] The amplified promoter and the amplified targeting sequences are digested with the appropriate restriction enzymes and subsequently treated with calf intestinal phosphatase. The digested promoter and digested targeting sequences are added together in the presence of T4 DNA ligase. The resulting mixture is maintained under conditions appropriate for ligation of the two fragments. The construct is size fractionated on an agarose gel, then purified by phenol extraction and ethanol precipitation.

[0992] In this Example, the polynucleotide constructs are administered as naked polynucleotides via electroporation. However, the polynucleotide constructs may also be administered with transfection-facilitating agents, such as liposomes, viral sequences, viral particles, precipitating agents, etc. Such methods of delivery are known in the art.

[0993] Once the cells are transfected, homologous recombination will take place which results in the promoter being operably linked to the endogenous polynucleotide sequence. This results in the expression of polynucleotide corresponding to the polynucleotide in the cell. Expression may be detected by immunological staining, or any other method known in the art.

[0994] Fibroblasts are obtained from a subject by skin biopsy. The resulting tissue is placed in DMEM+10% fetal calf serum. Exponentially growing or early stationary phase fibroblasts are trypsinized and rinsed from the plastic surface with nutrient medium. An aliquot of the cell suspension is removed for counting, and the remaining cells are subjected to centrifugation. The supernatant is aspirated and the pellet is resuspended in 5 ml of electroporation buffer (20 mM HEPES pH 7.3, 137 mM NaCl, 5 mM KCl, 0.7 mM Na₂ HPO₄, 6 mM dextrose). The cells are recentrifuged, the supernatant aspirated, and the cells resuspended in electroporation buffer containing 1 mg/ml acetylated bovine serum albumin. The final cell suspension contains approximately 3×10⁶ cells/ml. Electroporation should be performed immediately following resuspension.

[0995] Plasmid DNA is prepared according to standard techniques. For example, to construct a plasmid for targeting to the locus corresponding to the polynucleotide of the invention, plasmid pUC18 (MBI Fermentas, Amherst, N.Y.) is digested with HindIII. The CMV promoter is amplified by PCR with an XbaI site on the 5′ end and a BamHI site on the 3′ end. Two non-coding sequences are amplified via PCR: one non-coding sequence (fragment 1) is amplified with a HindIII site at the 5′ end and an Xba site at the 3′end; the other non-coding sequence (fragment 2) is amplified with a BamHI site at the 5′end and a HindIII site at the 3′end. The CMV promoter and the fragments (1 and 2) are digested with the appropriate enzymes (CMV promoter-XbaI and BamHI; fragment 1-XbaI; fragment 2-BamHI) and ligated together. The resulting ligation product is digested with HindIII, and ligated with the HindIII-digested pUC18 plasmid.

[0996] Plasmid DNA is added to a sterile cuvette with a 0.4 cm electrode gap (Bio-Rad). The final DNA concentration is generally at least 120 μg/ml. 0.5 ml of the cell suspension (containing approximately 1.5.×10⁶ cells) is then added to the cuvette, and the cell suspension and DNA solutions are gently mixed. Electroporation is performed with a Gene-Pulser apparatus (Bio-Rad). Capacitance and voltage are set at 960 μF and 250-300 V, respectively. As voltage increases, cell survival decreases, but the percentage of surviving cells that stably incorporate the introduced DNA into their genome increases dramatically. Given these parameters, a pulse time of approximately 14-20 mSec should be observed.

[0997] Electroporated cells are maintained at room temperature for approximately 5 min, and the contents of the cuvette are then gently removed with a sterile transfer pipette. The cells are added directly to 10 ml of prewarmed nutrient media (DMEM with 15% calf serum) in a 10 cm dish and incubated at 37 degree C. The following day, the media is aspirated and replaced with 10 ml of fresh media and incubated for a further 16-24 hours.

[0998] The engineered fibroblasts are then injected into the host, either alone or after having been grown to confluence on cytodex 3 microcarrier beads. The fibroblasts now produce the protein product. The fibroblasts can then be introduced into a patient as described above.

### EXAMPLE 18

### Method of Treatment Using Gene Therapy—In Vivo

[0999] Another aspect of the present invention is using in vivo gene therapy methods to treat disorders, diseases and conditions. The gene therapy method relates to the introduction of naked nucleic acid (DNA, RNA, and antisense DNA or RNA) sequences into an animal to increase or decrease the expression of the polypeptide. The polynucleotide of the present invention may be operatively linked to (i.e., associated with) a promoter or any other genetic elements necessary for the expression of the polypeptide by the target tissue. Such gene therapy and delivery techniques and methods are known in the art, see, for example, WO90/11092, WO98/11779; U.S. Pat. No. 5,693,622, 5,705,151, 5,580,859; Tabata et al., Cardiovasc. Res. 35(3):470-479 (1997); Chao et al., Pharmacol. Res. 35(6):517-522 (1997); Wolff, Neuromuscul. Disord. 7(5):314-318 (1997); Schwartz et al., Gene Ther. 3(5):405-411 (1996); Tsurumi et al., Circulation 94(12):3281-3290 (1996) (incorporated herein by reference).

[1000] The polynucleotide constructs may be delivered by any method that delivers injectable materials to the cells of an animal, such as, injection into the interstitial space of tissues (heart, muscle, skin, lung, liver, intestine and the like). The polynucleotide constructs can be delivered in a pharmaceutically acceptable liquid or aqueous carrier.

[1001] The term “naked” polynucleotide, DNA or RNA, refers to sequences that are free from any delivery vehicle that acts to assist, promote, or facilitate entry into the cell, including viral sequences, viral particles, liposome formulations, lipofectin or precipitating agents and the like. However, the polynucleotides of the present invention may also be delivered in liposome formulations (such as those taught in Felgner P. L. et al. (1995) Ann. NY Acad. Sci. 772:126-139 and Abdallah B. et al. (1995) Biol. Cell 85(1):1-7) which can be prepared by methods well known to those skilled in the art.

[1002] The polynucleotide vector constructs used in the gene therapy method are preferably constructs that will not integrate into the host genome nor will they contain sequences that allow for replication. Any strong promoter known to those skilled in the art can be used for driving the expression of DNA. Unlike other gene therapy techniques, one major advantage of introducing naked nucleic acid sequences into target cells is the transitory nature of the polynucleotide synthesis in the cells. Studies have shown that non-replicating DNA sequences can be introduced into cells to provide production of the desired polypeptide for periods of up to six months.

[1003] The polynucleotide construct can be delivered to the interstitial space of tissues within an animal, including muscle, skin, brain, lung, liver, spleen, bone marrow, thymus, heart, lymph, blood, bone, cartilage, pancreas, kidney, gall bladder, stomach, intestine, testis, ovary, uterus, rectum, nervous system, eye, gland, and connective tissue. Interstitial space of the tissues comprises the intercellular fluid, mucopolysaccharide matrix among the reticular fibers of organ tissues, elastic fibers in the walls of vessels or chambers, collagen fibers of fibrous tissues, or that same matrix within connective tissue ensheathing muscle cells or in the lacunae of bone. It is similarly the space occupied by the plasma of the circulation and the lymph fluid of the lymphatic channels. Delivery to the interstitial space of muscle tissue is preferred for the reasons discussed below. They may be conveniently delivered by injection into the tissues comprising these cells. They are preferably delivered to and expressed in persistent, non-dividing cells which are differentiated, although delivery and expression may be achieved in non-differentiated or less completely differentiated cells, such as, for example, stem cells of blood or skin fibroblasts. In vivo muscle cells are particularly competent in their ability to take up and express polynucleotides.

[1004] For the naked polynucleotide injection, an effective dosage amount of DNA or RNA will be in the range of from about 0.05 g/kg body weight to about 50 mg/kg body weight. Preferably the dosage will be from about 0.005 mg/kg to about 20 mg/kg and more preferably from about 0.05 mg/kg to about 5 mg/kg. Of course, as the artisan of ordinary skill will appreciate, this dosage will vary according to the tissue site of injection. The appropriate and effective dosage of nucleic acid sequence can readily be determined by those of ordinary skill in the art and may depend on the condition being treated and the route of administration. The preferred route of administration is by the parenteral route of injection into the interstitial space of tissues. However, other parenteral routes may also be used, such as, inhalation of an aerosol formulation particularly for delivery to lungs or bronchial tissues, throat or mucous membranes of the nose. In addition, naked polynucleotide constructs can be delivered to arteries during angioplasty by the catheter used in the procedure.

[1005] The dose response effects of injected polynucleotide in muscle in vivo is determined as follows. Suitable template DNA for production of mRNA coding for polypeptide of the present invention is prepared in accordance with a standard recombinant DNA methodology. The template DNA, which may be either circular or linear, is either used as naked DNA or complexed with liposomes. The quadriceps muscles of mice are then injected with various amounts of the template DNA.

[1006] Five to six week old female and male Balb/C mice are anesthetized by intraperitoneal injection with 0.3 ml of 2.5% Avertin. A 1.5 cm incision is made on the anterior thigh, and the quadriceps muscle is directly visualized. The template DNA is injected in 0.1 ml of carrier in a 1 cc syringe through a 27 gauge needle over one minute, approximately 0.5 cm from the distal insertion site of the muscle into the knee and about 0.2 cm deep. A suture is placed over the injection site for future localization, and the skin is closed with stainless steel clips.

[1007] After an appropriate incubation time (e.g., 7 days) muscle extracts are prepared by excising the entire quadriceps. Every fifth 15 um cross-section of the individual quadriceps muscles is histochemically stained for protein expression. A time course for protein expression may be done in a similar fashion except that quadriceps from different mice are harvested at different times. Persistence of DNA in muscle following injection may be determined by Southern blot analysis after preparing total cellular DNA and HIRT supernatants from injected and control mice. The results of the above experimentation in mice can be used to extrapolate proper dosages and other treatment parameters in humans and other animals using naked DNA.

### EXAMPLE 19

### Transgenic Animals

[1008] The polypeptides of the invention can also be expressed in transgenic animals. Animals of any species, including, but not limited to, mice, rats, rabbits, hamsters, guinea pigs, pigs, micro-pigs, goats, sheep, cows and non-human primates, eg., baboons, monkeys, and chimpanzees may be used to generate transgenic animals. In a specific embodiment, techniques described herein or otherwise known in the art, are used to express polypeptides of the invention in humans, as part of a gene therapy protocol.

[1009] Any technique known in the art may be used to introduce the transgene (i.e., polynucleotides of the invention) into animals to produce the founder lines of transgenic animals. Such techniques include, but are not limited to, pronuclear microinjection (Paterson et al., Appl. Microbiol. Biotechnol. 40:691-698 (1994); Carver et al., Biotechnology (NY) 11:1263-1270 (1993); Wright et al., Biotechnology (NY) 9:830-834 (1991); and Hoppe et al., U.S. Pat. No. 4,873,191 (1989)); retrovirus mediated gene transfer into germ lines (Van der Putten et al., Proc. Natl. Acad. Sci., USA 82:6148-6152 (1985)), blastocysts or embryos; gene targeting in embryonic stem cells (Thompson et al., Cell 56:313-321 (1989)); electroporation of cells or embryos (Lo, 1983, Mol Cell. Biol. 3:1803-1814 (1983)); introduction of the polynucleotides of the invention using a gene gun (see, e.g., Ulmer et al., Science 259:1745 (1993); introducing nucleic acid constructs into embryonic pleuripotent stem cells and transferring the stem cells back into the blastocyst; and sperm-mediated gene transfer (Lavitrano et al., Cell 57:717-723 (1989); etc. For a review of such techniques, see Gordon, “Transgenic Animals,” Intl. Rev. Cytol. 115:171-229 (1989), which is incorporated by reference herein in its entirety.

[1010] Any technique known in the art may be used to produce transgenic clones containing polynucleotides of the invention, for example, nuclear transfer into enucleated oocytes of nuclei from cultured embryonic, fetal, or adult cells induced to quiescence (Campell et al., Nature 380:64-66 (1996); Wilmut et al., Nature 385:810-813 (1997)).

[1011] The present invention provides for transgenic animals that carry the transgene in all their cells, as well as animals which carry the transgene in some, but not all their cells, i.e., mosaic animals or chimeric. The transgene may be integrated as a single transgene or as multiple copies such as in concatamers, e.g., head-to-head tandems or head-to-tail tandems. The transgene may also be selectively introduced into and activated in a particular cell type by following, for example, the teaching of Lasko et al. (Lasko et al., Proc. Natl. Acad. Sci. USA 89:6232-6236 (1992)). The regulatory sequences required for such a cell-type specific activation will depend upon the particular cell type of interest, and will be apparent to those of skill in the art. When it is desired that the polynucleotide transgene be integrated into the chromosomal site of the endogenous gene, gene targeting is preferred. Briefly, when such a technique is to be utilized, vectors containing some nucleotide sequences homologous to the endogenous gene are designed for the purpose of integrating, via homologous recombination with chromosomal sequences, into and disrupting the function of the nucleotide sequence of the endogenous gene. The transgene may also be selectively introduced into a particular cell type, thus inactivating the endogenous gene in only that cell type, by following, for example, the teaching of Gu et al. (Gu et al., Science 265:103-106 (1994)). The regulatory sequences required for such a cell-type specific inactivation will depend upon the particular cell type of interest, and will be apparent to those of skill in the art.

[1012] Once transgenic animals have been generated, the expression of the recombinant gene may be assayed utilizing standard techniques. Initial screening may be accomplished by Southern blot analysis or PCR techniques to analyze animal tissues to verify that integration of the transgene has taken place. The level of mRNA expression of the transgene in the tissues of the transgenic animals may also be assessed using techniques which include, but are not limited to, Northern blot analysis of tissue samples obtained from the animal, in situ hybridization analysis, and reverse transcriptase-PCR (rt-PCR). Samples of transgenic gene-expressing tissue may also be evaluated immunocytochemically or immunohistochemically using antibodies specific for the transgene product.

[1013] Once the founder animals are produced, they may be bred, inbred, outbred, or crossbred to produce colonies of the particular animal. Examples of such breeding strategies include, but are not limited to: outbreeding of founder animals with more than one integration site in order to establish separate lines; inbreeding of separate lines in order to produce compound transgenics that express the transgene at higher levels because of the effects of additive expression of each transgene; crossing of heterozygous transgenic animals to produce animals homozygous for a given integration site in order to both augment expression and eliminate the need for screening of animals by DNA analysis; crossing of separate homozygous lines to produce compound heterozygous or homozygous lines; and breeding to place the transgene on a distinct background that is appropriate for an experimental model of interest.

[1014] Transgenic animals of the invention have uses which include, but are not limited to, animal model systems useful in elaborating the biological function of polypeptides of the present invention, studying conditions and/or disorders associated with aberrant expression, and in screening for compounds effective in ameliorating such conditions and/or disorders.

### EXAMPLE 20

### Knock-Out Animals

[1015] Endogenous gene expression can also be reduced by inactivating or “knocking out” the gene and/or its promoter using targeted homologous recombination. (e.g., see Smithies et al., Nature 317:230-234 (1985); Thomas & Capecchi, Cell 51:503-512 (1987); Thompson et al., Cell 5:313-321 (1989); each of which is incorporated by reference herein in its entirety). For example, a mutant, non-functional polynucleotide of the invention (or a completely unrelated DNA sequence) flanked by DNA homologous to the endogenous polynucleotide sequence (either the coding regions or regulatory regions of the gene) can be used, with or without a selectable marker and/or a negative selectable marker, to transfect cells that express polypeptides of the invention in vivo. In another embodiment, techniques known in the art are used to generate knockouts in cells that contain, but do not express the gene of interest. Insertion of the DNA construct, via targeted homologous recombination, results in inactivation of the targeted gene. Such approaches are particularly suited in research and agricultural fields where modifications to embryonic stem cells can be used to generate animal offspring with an inactive targeted gene (e.g., see Thomas & Capecchi 1987 and Thompson 1989, supra). However this approach can be routinely adapted for use in humans provided the recombinant DNA constructs are directly administered or targeted to the required site in vivo using appropriate viral vectors that will be apparent to those of skill in the art.

[1016] In further embodiments of the invention, cells that are genetically engineered to express the polypeptides of the invention, or alternatively, that are genetically engineered not to express the polypeptides of the invention (e.g., knockouts) are administered to a patient in vivo. Such cells may be obtained from the patient (i.e., animal, including human) or an MHC compatible donor and can include, but are not limited to fibroblasts, bone marrow cells, blood cells (e.g., lymphocytes), adipocytes, muscle cells, endothelial cells etc. The cells are genetically engineered in vitro using recombinant DNA techniques to introduce the coding sequence of polypeptides of the invention into the cells, or alternatively, to disrupt the coding sequence and/or endogenous regulatory sequence associated with the polypeptides of the invention, e.g., by transduction (using viral vectors, and preferably vectors that integrate the transgene into the cell genome) or transfection procedures, including, but not limited to, the use of plasmids, cosmids, YACs, naked DNA, electroporation, liposomes, etc. The coding sequence of the polypeptides of the invention can be placed under the control of a strong constitutive or inducible promoter or promoter/enhancer to achieve expression, and preferably secretion, of the polypeptides of the invention. The engineered cells which express and preferably secrete the polypeptides of the invention can be introduced into the patient systemically, e.g., in the circulation, or intraperitoneally.

[1017] Alternatively, the cells can be incorporated into a matrix and implanted in the body, e.g., genetically engineered fibroblasts can be implanted as part of a skin graft; genetically engineered endothelial cells can be implanted as part of a lymphatic or vascular graft. (See, for example, Anderson et al. U.S. Pat. No. 5,399,349; and Mulligan & Wilson, U.S. Pat. No. 5,460,959 each of which is incorporated by reference herein in its entirety).

[1018] When the cells to be administered are non-autologous or non-MHC compatible cells, they can be administered using well known techniques which prevent the development of a host immune response against the introduced cells. For example, the cells may be introduced in an encapsulated form which, while allowing for an exchange of components with the immediate extracellular environment, does not allow the introduced cells to be recognized by the host immune system.

[1019] Transgenic and “knock-out” animals of the invention have uses which include, but are not limited to, animal model systems useful in elaborating the biological function of polypeptides of the present invention, studying conditions and/or disorders associated with aberrant expression, and in screening for compounds effective in ameliorating such conditions and/or disorders.

### EXAMPLE 21

### Assays Detecting Stimulation or Inhibition of B Cell Proliferation and Differentiation

[1020] Generation of functional humoral immune responses requires both soluble and cognate signaling between B-lineage cells and their microenvironment. Signals may impart a positive stimulus that allows a B-lineage cell to continue its programmed development, or a negative stimulus that instructs the cell to arrest its current developmental pathway. To date, numerous stimulatory and inhibitory signals have been found to influence B cell responsiveness including IL-2, IL-4, IL-5, IL-6, IL-7, IL10, IL-13, IL-14 and IL-15. Interestingly, these signals are be themselves weak effectors but can, in combination with various co-stimulatory proteins, induce activation, proliferation, differentiation, homing, tolerance and death among B cell populations.

[1021] One of the best studied classes of B-cell co-stimulatory proteins is the TNF-superfamily. Within this family CD40, CD27, and CD30 along with their respective ligands CD154, CD70, and CD153 have been found to regulate a variety of immune responses. Assays which allow for the detection and/or observation of the proliferation and differentiation of these B-cell populations and their precursors are valuable tools in determining the effects various proteins may have on these B-cell populations in terms of proliferation and differentiation. Listed below are two assays designed to allow for the detection of the differentiation, proliferation, or inhibition of B-cell populations and their precursors.

[1022] In Vitro Assay- Agonists or antagonists of the invention can be assessed for its ability to induce activation, proliferation, differentiation or inhibition and/or death in B-cell populations and their precursors. The activity of the agonists or antagonists of the invention on purified human tonsillar B cells, measured qualitatively over the dose range from 0.1 to 10,000 ng/mL, is assessed in a standard B-lymphocyte co-stimulation assay in which purified tonsillar B cells are cultured in the presence of either formalin-fixed Staphylococcus aureus Cowan I (SAC) or immobilized anti-human IgM antibody as the priming agent. Second signals such as IL-2 and IL-15 synergize with SAC and IgM crosslinking to elicit B cell proliferation as measured by tritiated-thymidine incorporation. Novel synergizing agents can be readily identified using this assay. The assay involves isolating human tonsillar B cells by magnetic bead (MACS) depletion of CD3-positive cells. The resulting cell population is greater than 95% B cells as assessed by expression of CD45R(B220).

[1023] Various dilutions of each sample are placed into individual wells of a 96-well plate to which are added 10⁵ B-cells suspended in culture medium (RPMI 1640 containing 10% FBS, 5×10⁻⁵M 2ME, 100 U/ml penicillin, 10 ug/ml streptomycin, and 10⁻⁵ dilution of SAC) in a total volume of 150 ul. Proliferation or inhibition is quantitated by a 20 h pulse (1 uCi/well) with 3 H-thymidine (6.7 Ci/mM) beginning 72 h post factor addition. The positive and negative controls are IL2 and medium respectively.

[1024] In vivo Assay-BALB/c mice are injected (i.p.) twice per day with buffer only, or 2 mg/Kg of agonists or antagonists of the invention, or truncated forms thereof. Mice receive this treatment for 4 consecutive days, at which time they are sacrificed and various tissues and serum collected for analyses. Comparison of H&E sections from normal spleens and spleens treated with agonists or antagonists of the invention identify the results of the activity of the agonists or antagonists on spleen cells, such as the diffusion of peri-arterial lymphatic sheaths, and/or significant increases in the nucleated cellularity of the red pulp regions, which may indicate the activation of the differentiation and proliferation of B-cell populations. Immunohistochemical studies using a B cell marker, anti-CD45R(B220), are used to determine whether any physiological changes to splenic cells, such as splenic disorganization, are due to increased B-cell representation within loosely defined B-cell zones that infiltrate established T-cell regions.

[1025] Flow cytometric analyses of the spleens from mice treated with agonist or antagonist is used to indicate whether the agonists or antagonists specifically increases the proportion of ThB+, CD45R(B220)dull B cells over that which is observed in control mice.

[1026] Likewise, a predicted consequence of increased mature B-cell representation in vivo is a relative increase in serum Ig titers. Accordingly, serum IgM and IgA levels are compared between buffer and agonists or antagonists-treated mice.

[1027] The studies described in this example tested activity of agonists or antagonists of the invention. However, one skilled in the art could easily modify the exemplified studies to test the activity of polynucleotides or polypeptides of the invention (e.g., gene therapy).

### EXAMPLE 22

### T Cell Proliferation Assay

[1028] A CD3-induced proliferation assay is performed on PBMCs and is measured by the uptake of ³H-thymidine. The assay is performed as follows. Ninety-six well plates are coated with 100 μl/well of mAb to CD3 (HIT3a, Pharmingen) or isotype-matched control mAb (B33.1) overnight at 4 degrees C. (1 μg/ml in 0.05 M bicarbonate buffer, pH 9.5), then washed three times with PBS. PBMC are isolated by F/H gradient centrifugation from human peripheral blood and added to quadruplicate wells (5×10⁴/well) of mAb coated plates in RPMI containing 10% FCS and P/S in the presence of varying concentrations of agonists or antagonists of the invention (total volume 200 ul). Relevant protein buffer and medium alone are controls. After 48 hr. culture at 37 degrees C., plates are spun for 2 min. at 1000 rpm and 100 μl of supernatant is removed and stored −20 degrees C. for measurement of IL-2 (or other cytokines) if effect on proliferation is observed. Wells are supplemented with 100 ul of medium containing 0.5 uCi of ³H-thymidine and cultured at 37 degrees C. for 18-24 hr. Wells are harvested and incorporation of ³H-thymidine used as a measure of proliferation. Anti-CD3 alone is the positive control for proliferation. IL-2 (100 U/ml) is also used as a control which enhances proliferation. Control antibody which does not induce proliferation of T cells is used as the negative control for the effects of agonists or antagonists of the invention.

[1029] The studies described in this example tested activity of agonists or antagonists of the invention. However, one skilled in the art could easily modify the exemplified studies to test the activity of polynucleotides or polypeptides of the invention (e.g., gene therapy).

### EXAMPLE 23

### Effect of Agonists or Antagonists of the Invention on the Expression of MHC Class II, Costimulatory and Adhesion Molecules and Cell Differentiation of Monocytes and Monocyte-Derived Human Dendritic Cells

[1030] Dendritic cells are generated by the expansion of proliferating precursors found in the peripheral blood: adherent PBMC or elutriated monocytic fractions are cultured for 7-10 days with GM-CSF (50 ng/ml) and IL-4 (20 ng/ml). These dendritic cells have the characteristic phenotype of immature cells (expression of CD1, CD80, CD86, CD40 and MHC class II antigens). Treatment with activating factors, such as TNF-α, causes a rapid change in surface phenotype (increased expression of MHC class I and II, costimulatory and adhesion molecules, downregulation of FCγRII, upregulation of CD83). These changes correlate with increased antigen-presenting capacity and with functional maturation of the dendritic cells.

[1031] FACS analysis of surface antigens is performed as follows. Cells are treated 1-3 days with increasing concentrations of agonist or antagonist of the invention or LPS (positive control), washed with PBS containing 1% BSA and 0.02 mM sodium azide, and then incubated with 1:20 dilution of appropriate FITC- or PE-labeled monoclonal antibodies for 30 minutes at 4 degrees C. After an additional wash, the labeled cells are analyzed by flow cytometry on a FACScan (Becton Dickinson).

[1032] Effect on the production of cvtokines. Cytokines generated by dendritic cells, in particular IL-12, are important in the initiation of T-cell dependent immune responses. IL-12 strongly influences the development of Thl helper T-cell immune response, and induces cytotoxic T and NK cell function. An ELISA is used to measure the IL-12 release as follows. Dendritic cells (10⁶/ml) are treated with increasing concentrations of agonists or antagonists of the invention for 24 hours. LPS (100 ng/ml) is added to the cell culture as positive control. Supernatants from the cell cultures are then collected and analyzed for IL-12 content using commercial ELISA kit (e.g., R & D Systems (Minneapolis, Minn.)). The standard protocols provided with the kits are used.

[1033] Effect on the expression of MHC Class II, costimulatory and adhesion molecules. Three major families of cell surface antigens can be identified on monocytes: adhesion molecules, molecules involved in antigen presentation, and Fc receptor. Modulation of the expression of MHC class II antigens and other costimulatory molecules, such as B7 and ICAM-1, may result in changes in the antigen presenting capacity of monocytes and ability to induce T cell activation. Increased expression of Fc receptors may correlate with improved monocyte cytotoxic activity, cytokine release and phagocytosis.

[1034] FACS analysis is used to examine the surface antigens as follows. Monocytes are treated 1-5 days with increasing concentrations of agonists or antagonists of the invention or LPS (positive control), washed with PBS containing 1% BSA and 0.02 mM sodium azide, and then incubated with 1:20 dilution of appropriate FITC- or PE-labeled monoclonal antibodies for 30 minutes at 4 degrees C. After an additional wash, the labeled cells are analyzed by flow cytometry on a FACScan (Becton Dickinson).

[1035] Monocyte activation and/or increased survival. Assays for molecules that activate (or alternatively, inactivate) monocytes and/or increase monocyte survival (or alternatively, decrease monocyte survival) are known in the art and may routinely be applied to determine whether a molecule of the invention functions as an inhibitor or activator of monocytes. Agonists or antagonists of the invention can be screened using the three assays described below. For each of these assays, Peripheral blood mononuclear cells (PBMC) are purified from single donor leukopacks (American Red Cross, Baltimore, Md.) by centrifugation through a Histopaque gradient (Sigma). Monocytes are isolated from PBMC by counterflow centrifugal elutriation.

[1036] Monocyte Survival Assay. Human peripheral blood monocytes progressively lose viability when cultured in absence of serum or other stimuli. Their death results from internally regulated processes (apoptosis). Addition to the culture of activating factors, such as TNF-alpha dramatically improves cell survival and prevents DNA fragmentation. Propidium iodide (PI) staining is used to measure apoptosis as follows. Monocytes are cultured for 48 hours in polypropylene tubes in serum-free medium (positive control), in the presence of 100 ng/ml TNF-alpha (negative control), and in the presence of varying concentrations of the compound to be tested. Cells are suspended at a concentration of 2×10⁶/ml in PBS containing PI at a final concentration of 5 μg/ml, and then incubated at room temperature for 5 minutes before FACScan analysis. PI uptake has been demonstrated to correlate with DNA fragmentation in this experimental paradigm.

[1037] Effect on cytokine release. An important function of monocytes/macrophages is their regulatory activity on other cellular populations of the immune system through the release of cytokines after stimulation. An ELISA to measure cytokine release is performed as follows. Human monocytes are incubated at a density of 5×10⁵ cells/ml with increasing concentrations of agonists or antagonists of the invention and under the same conditions, but in the absence of agonists or antagonists. For IL-12 production, the cells are primed overnight with IFN (100 U/ml) in the presence of agonist or antagonist of the invention. LPS (10 ng/ml) is then added. Conditioned media are collected after 24 h and kept frozen until use. Measurement of TNF-alpha, IL-10, MCP-1 and IL-8 is then performed using a commercially available ELISA kit (e.g., R & D Systems (Minneapolis, Minn.)) and applying the standard protocols provided with the kit.

[1038] Oxidative burst. Purified monocytes are plated in 96-w plate at 2-1×10⁵ cell/well. Increasing concentrations of agonists or antagonists of the invention are added to the wells in a total volume of 0.2 ml culture medium (RPMI 1640+10% FCS, glutamine and antibiotics). After 3 days incubation, the plates are centrifuged and the medium is removed from the wells. To the macrophage monolayers, 0.2 ml per well of phenol red solution (140 mM NaCl, 10 mM potassium phosphate buffer pH 7.0, 5.5 mM dextrose, 0.56 mM phenol red and 19 U/ml of HRPO) is added, together with the stimulant (200 nM PMA). The plates are incubated at 37° C. for 2 hours and the reaction is stopped by adding 20 μl 1N NaOH per well. The absorbance is read at 610 nm. To calculate the amount of H₂O₂) produced by the macrophages, a standard curve of a H₂O₂ solution of known molarity is performed for each experiment.

[1039] The studies described in this example tested activity of agonists or antagonists of the invention. However, one skilled in the art could easily modify the exemplified studies to test the activity of polynucleotides or polypeptides of the invention (e.g., gene therapy).

### EXAMPLE 24

### Biological Effects of Agonists or Antagonists of the Invention

### Astrocyte and Neuronal Assays

[1040] Agonists or antagonists of the invention, expressed in Escherichia coli and purified as described above, can be tested for activity in promoting the survival, neurite outgrowth, or phenotypic differentiation of cortical neuronal cells and for inducing the proliferation of glial fibrillary acidic protein immunopositive cells, astrocytes. The selection of cortical cells for the bioassay is based on the prevalent expression of FGF-1 and FGF-2 in cortical structures and on the previously reported enhancement of cortical neuronal survival resulting from FGF-2 treatment. A thymidine incorporation assay, for example, can be used to elucidate an agonist or antagonist of the invention's activity on these cells.

[1041] Moreover, previous reports describing the biological effects of FGF-2 (basic FGF) on cortical or hippocampal neurons in vitro have demonstrated increases in both neuron survival and neurite outgrowth (Walicke et al., “Fibroblast growth factor promotes survival of dissociated hippocampal neurons and enhances neurite extension.” Proc. Natl. Acad. Sci. USA 83:3012-3016. (1986), assay herein incorporated by reference in its entirety). However, reports from experiments done on PC-12 cells suggest that these two responses are not necessarily synonymous and may depend on not only which FGF is being tested but also on which receptor(s) are expressed on the target cells. Using the primary cortical neuronal culture paradigm, the ability of an agonist or antagonist of the invention to induce neurite outgrowth can be compared to the response achieved with FGF-2 using, for example, a thymidine incorporation assay.

### Fibroblast and endothelial cell assays

[1042] Human lung fibroblasts are obtained from Clonetics (San Diego, Calif.) and maintained in growth media from Clonetics. Dermal microvascular endothelial cells are obtained from Cell Applications (San Diego, Calif.). For proliferation assays, the human lung fibroblasts and dermal microvascular endothelial cells can be cultured at 5,000 cells/well in a 96-well plate for one day in growth medium. The cells are then incubated for one day in 0.1% BSA basal medium. After replacing the medium with fresh 0.1% BSA medium, the cells are incubated with the test proteins for 3 days. Alamar Blue (Alamar Biosciences, Sacramento, Calif.) is added to each well to a final concentration of 10%. The cells are incubated for 4 hr. Cell viability is measured by reading in a CytoFluor fluorescence reader. For the PGE₂ assays, the human lung fibroblasts are cultured at 5,000 cells/well in a 96-well plate for one day. After a medium change to 0.1% BSA basal medium, the cells are incubated with FGF-2 or agonists or antagonists of the invention with or without IL-1α for 24 hours. The supernatants are collected and assayed for PGE₂ by EIA kit (Cayman, Ann Arbor, Mich.). For the IL-6 assays, the human lung fibroblasts are cultured at 5,000 cells/well in a 96-well plate for one day. After a medium change to 0.1% BSA basal medium, the cells are incubated with FGF-2 or with or without agonists or antagonists of the invention IL-1α for 24 hours. The supernatants are collected and assayed for IL-6 by ELISA kit (Endogen, Cambridge, Mass.).

[1043] Human lung fibroblasts are cultured with FGF-2 or agonists or antagonists of the invention for 3 days in basal medium before the addition of Alamar Blue to assess effects on growth of the fibroblasts. FGF-2 should show a stimulation at 10-2500 ng/ml which can be used to compare stimulation with agonists or antagonists of the invention.

### Parkinson Models

[1044] The loss of motor function in Parkinson's disease is attributed to a deficiency of striatal dopamine resulting from the degeneration of the nigrostriatal dopaminergic projection neurons. An animal model for Parkinson's that has been extensively characterized involves the systemic administration of 1-methyl-4 phenyl 1,2,3,6-tetrahydropyridine (MPTP). In the CNS, MPTP is taken-up by astrocytes and catabolized by monoamine oxidase B to 1-methyl-4-phenyl pyridine (MPP⁺) and released. Subsequently, MPP⁺ is actively accumulated in dopaminergic neurons by the high-affinity reuptake transporter for dopamine. MPP⁺ is then concentrated in mitochondria by the electrochemical gradient and selectively inhibits nicotidamide adenine disphosphate: ubiquinone oxidoreductionase (complex I), thereby interfering with electron transport and eventually generating oxygen radicals.

[1045] It has been demonstrated in tissue culture paradigms that FGF-2 (basic FGF) has trophic activity towards nigral dopaminergic neurons (Ferrari et al., Dev. Biol. 1989). Recently, Dr. Unsicker's group has demonstrated that administering FGF-2 in gel foam implants in the striatum results in the near complete protection of nigral dopaminergic neurons from the toxicity associated with MPTP exposure (Otto and Unsicker, J. Neuroscience, 1990).

[1046] Based on the data with FGF-2, agonists or antagonists of the invention can be evaluated to determine whether it has an action similar to that of FGF-2 in enhancing dopaminergic neuronal survival in vitro and it can also be tested in vivo for protection of dopaminergic neurons in the striatum from the damage associated with MPTP treatment. The potential effect of an agonist or antagonist of the invention is first examined in vitro in a dopaminergic neuronal cell culture paradigm. The cultures are prepared by dissecting the midbrain floor plate from gestation day 14 Wistar rat embryos. The tissue is dissociated with trypsin and seeded at a density of 200,000 cells/cm² on polyorthinine-laminin coated glass coverslips. The cells are maintained in Dulbecco's Modified Eagle's medium and F12 medium containing hormonal supplements (N1). The cultures are fixed with paraformaldehyde after 8 days in vitro and are processed for tyrosine hydroxylase, a specific marker for dopaminergic neurons, immunohistochemical staining. Dissociated cell cultures are prepared from embryonic rats. The culture medium is changed every third day and the factors are also added at that time.

[1047] Since the doparninergic neurons are isolated from animals at gestation day 14, a developmental time which is past the stage when the dopaminergic precursor cells are proliferating, an increase in the number of tyrosine hydroxylase immunopositive neurons would represent an increase in the number of dopaminergic neurons surviving in vitro. Therefore, if an agonist or antagonist of the invention acts to prolong the survival of dopaminergic neurons, it would suggest that the agonist or antagonist may be involved in Parkinson's Disease.

[1048] The studies described in this example tested activity of agonists or antagonists of the invention. However, one skilled in the art could easily modify the exemplified studies to test the activity of polynucleotides or polypeptides of the invention (e.g., gene therapy).

### EXAMPLE 25

### The Effect of Agonists or Antagonists of the Invention on the Growth of Vascular Endothelial Cells

[1049] On day 1, human umbilical vein endothelial cells (HUVEC) are seeded at 2-5×10⁴ cells/35 mm dish density in M199 medium containing 4% fetal bovine serum (FBS), 16 units/ml heparin, and 50 units/ml endothelial cell growth supplements (ECGS, Biotechnique, Inc.). On day 2, the medium is replaced with M199 containing 10% FBS, 8 units/ml heparin. An agonist or antagonist of the invention, and positive controls, such as VEGF and basic FGF (bFGF) are added, at varying concentrations. On days 4 and 6, the medium is replaced. On day 8, cell number is determined with a Coulter Counter.

[1050] An increase in the number of HUVEC cells indicates that the compound of the invention may proliferate vascular endothelial cells, while a decrease in the number of HUVEC cells indicates that the compound of the invention inhibits vascular endothelial cells.

[1051] The studies described in this example tested activity of a polypeptide of the invention. However, one skilled in the art could easily modify the exemplified studies to test the activity of polynucleotides (e.g., gene therapy), agonists, and/or antagonists of the invention.

### EXAMPLE 26

### Rat Corneal Wound Healing Model

[1052] This animal model shows the effect of an agonist or antagonist of the invention on neovascularization. The experimental protocol includes:

[1053] a) Making a 1-1.5 mm long incision from the center of cornea into the stromal layer.

[1054] b) Inserting a spatula below the lip of the incision facing the outer corner of the eye.

[1055] c) Making a pocket (its base is 1-1.5 mm form the edge of the eye).

[1056] d) Positioning a pellet, containing 50 ng-5 ug of an agonist or antagonist of the invention, within the pocket.

[1057] e) Treatment with an agonist or antagonist of the invention can also be applied topically to the corneal wounds in a dosage range of 20 mg-500 mg (daily treatment for five days).

[1058] The studies described in this example tested activity of agonists or antagonists of the invention. However, one skilled in the art could easily modify the exemplified studies to test the activity of polynucleotides or polypeptides of the invention (e.g., gene therapy).

### EXAMPLE 27

### Diabetic Mouse and Glucocorticoid-Impaired Wound Healing Models

### Diabetic db+/db+ Mouse Model.

[1059] To demonstrate that an agonist or antagonist of the invention accelerates the healing process, the genetically diabetic mouse model of wound healing is used. The full thickness wound healing model in the db+/db+ mouse is a well characterized, clinically relevant and reproducible model of impaired wound healing. Healing of the diabetic wound is dependent on formation of granulation tissue and re-epithelialization rather than contraction (Gartner, M. H. et al., J. Surg. Res. 52:389 (1992); Greenhalgh, D. G. et al., Am. J. Pathol. 136:1235 (1990)).

[1060] The diabetic animals have many of the characteristic features observed in Type II diabetes mellitus. Homozygous (db+/db+) mice are obese in comparison to their normal heterozygous (db+/+m) littermates. Mutant diabetic (db+/db+) mice have a single autosomal recessive mutation on chromosome 4 (db+) (Coleman et al. Proc. Natl. Acad. Sci. USA 77:283-293 (1982)). Animals show polyphagia, polydipsia and polyuria. Mutant diabetic mice (db+/db+) have elevated blood glucose, increased or normal insulin levels, and suppressed cell-mediated immunity (Mandel et al., J. Immunol. 120:1375 (1978); Debray-Sachs, M. et al., Clin. Exp. Immunol. 51(1):1-7 (1983); Leiter et al., Am. J. of Pathol. 114:46-55 (1985)). Peripheral neuropathy, myocardial complications, and microvascular lesions, basement membrane thickening and glomerular filtration abnormalities have been described in these animals (Norido, F. et al., Exp. Neurol. 83(2):221-232 (1984); Robertson et al., Diabetes 29(1):60-67 (1980); Giacomelli et al., Lab Invest. 40(4):460-473(1979); Coleman, D. L., Diabetes 31 (Suppl):1-6 (1982)). These homozygous diabetic mice develop hyperglycemia that is resistant to insulin analogous to human type II diabetes (Mandel et al., J. Immunol. 120:1375-1377 (1978)).

[1061] The characteristics observed in these animals suggests that healing in this model may be similar to the healing observed in human diabetes (Greenhalgh, et al., Am. J. of Pathol. 136:1235-1246 (1990)).

[1062] Genetically diabetic female C57BL/KsJ (db+/db+) mice and their non-diabetic (db+/+m) heterozygous littermates are used in this study (Jackson Laboratories). The animals are purchased at 6 weeks of age and are 8 weeks old at the beginning of the study. Animals are individually housed and received food and water ad libitum. All manipulations are performed using aseptic techniques. The experiments are conducted according to the rules and guidelines of Human Genome Sciences, Inc. Institutional Animal Care and Use Committee and the Guidelines for the Care and Use of Laboratory Animals.

[1063] Wounding protocol is performed according to previously reported methods (Tsuboi, R. and Rifkin, D. B., J. Exp. Med. 172:245-251 (1990)). Briefly, on the day of wounding, animals are anesthetized with an intraperitoneal injection of Avertin (0.01 mg/mL), 2,2,2-tribromoethanol and 2-methyl-2-butanol dissolved in deionized water. The dorsal region of the animal is shaved and the skin washed with 70% ethanol solution and iodine. The surgical area is dried with sterile gauze prior to wounding. An 8 mm full-thickness wound is then created using a Keyes tissue punch. Immediately following wounding, the surrounding skin is gently stretched to eliminate wound expansion. The wounds are left open for the duration of the experiment. Application of the treatment is given topically for 5 consecutive days commencing on the day of wounding. Prior to treatment, wounds are gently cleansed with sterile saline and gauze sponges.

[1064] Wounds are visually examined and photographed at a fixed distance at the day of surgery and at two day intervals thereafter. Wound closure is determined by daily measurement on days 1-5 and on day 8. Wounds are measured horizontally and vertically using a calibrated Jameson caliper. Wounds are considered healed if granulation tissue is no longer visible and the wound is covered by a continuous epithelium.

[1065] An agonist or antagonist of the invention is administered using at a range different doses, from 4 mg to 500 mg per wound per day for 8 days in vehicle. Vehicle control groups received 50 mL of vehicle solution.

[1066] Animals are euthanized on day 8 with an intraperitoneal injection of sodium pentobarbital (300 mg/kg). The wounds and surrounding skin are then harvested for histology and immunohistochemistry. Tissue specimens are placed in 10% neutral buffered formalin in tissue cassettes between biopsy sponges for further processing.

[1067] Three groups of 10 animals each (5 diabetic and 5 non-diabetic controls) are evaluated: 1) Vehicle placebo control, 2) untreated group, and 3) treated group.

[1068] Wound closure is analyzed by measuring the area in the vertical and horizontal axis and obtaining the total square area of the wound. Contraction is then estimated by establishing the differences between the initial wound area (day 0) and that of post treatment (day 8). The wound area on day 1 is 64 mm², the corresponding size of the dermal punch. Calculations are made using the following formula:

[Open area on day 8]-[Open area on day 1]/[Open area on day 1]

[1069] Specimens are fixed in 10% buffered formalin and paraffin embedded blocks are sectioned perpendicular to the wound surface (5 mm) and cut using a Reichert-Jung microtome. Routine hematoxylin-eosin (H&E) staining is performed on cross-sections of bisected wounds. Histologic examination of the wounds are used to assess whether the healing process and the morphologic appearance of the repaired skin is altered by treatment with an agonist or antagonist of the invention. This assessment included verification of the presence of cell accumulation, inflammatory cells, capillaries, fibroblasts, re-epithelialization and epidermal maturity (Greenhalgh, D. G. et al., Am. J. Pathol. 136:1235 (1990)). A calibrated lens micrometer is used by a blinded observer.

[1070] Tissue sections are also stained immunohistochemically with a polyclonal rabbit anti-human keratin antibody using ABC Elite detection system. Human skin is used as a positive tissue control while non-immune IgG is used as a negative control. Keratinocyte growth is determined by evaluating the extent of reepithelialization of the wound using a calibrated lens micrometer.

[1071] Proliferating cell nuclear antigen/cyclin (PCNA) in skin specimens is demonstrated by using anti-PCNA antibody (1:50) with an ABC Elite detection system. Human colon cancer served as a positive tissue control and human brain tissue is used as a negative tissue control. Each specimen included a section with omission of the primary antibody and substitution with non-immune mouse IgG. Ranking of these sections is based on the extent of proliferation on a scale of 0-8, the lower side of the scale reflecting slight proliferation to the higher side reflecting intense proliferation.

[1072] Experimental data are analyzed using an unpaired t test. A p value of <0.05 is considered significant.

### Steroid Impaired Rat Model

[1073] The inhibition of wound healing by steroids has been well documented in various in vitro and in vivo systems (Wahl, Glucocorticoids and Wound healing. In: Anti-Inflammatory Steroid Action: Basic and Clinical Aspects. 280-302 (1989); Wahl et al., J. Immunol. 115: 476-481 (1975); Werb et al., J. Exp. Med. 147:1684-1694 (1978)). Glucocorticoids retard wound healing by inhibiting angiogenesis, decreasing vascular permeability (Ebert et al., An. Intern. Med. 37:701-705 (1952)), fibroblast proliferation, and collagen synthesis (Beck et al., Growth Factors. 5: 295-304 (1991); Haynes et al., J. Clin. Invest. 61: 703-797 (1978)) and producing a transient reduction of circulating monocytes (Haynes et al., J. Clin. Invest. 61: 703-797 (1978); Wahl, “Glucocorticoids and wound healing”, In: Antiinflammatory Steroid Action: Basic and Clinical Aspects, Academic Press, New York, pp. 280-302 (1989)). The systemic administration of steroids to impaired wound healing is a well establish phenomenon in rats (Beck et al., Growth Factors. 5: 295-304 (1991); Haynes et al., J. Clin. Invest. 61: 703-797 (1978); Wahl, “Glucocorticoids and wound healing”, In: Antiinflammatory Steroid Action: Basic and Clinical Aspects, Academic Press, New York, pp. 280-302 (1989); Pierce et al., Proc. Natl. Acad. Sci. USA 86: 2229-2233 (1989)).

[1074] To demonstrate that an agonist or antagonist of the invention can accelerate the healing process, the effects of multiple topical applications of the agonist or antagonist on full thickness excisional skin wounds in rats in which healing has been impaired by the systemic administration of methylprednisolone is assessed.

[1075] Young adult male Sprague Dawley rats weighing 250-300 g (Charles River Laboratories) are used in this example. The animals are purchased at 8 weeks of age and are 9 weeks old at the beginning of the study. The healing response of rats is impaired by the systemic administration of methylprednisolone (17 mg/kg/rat intramuscularly) at the time of wounding. Animals are individually housed and received food and water ad libitum. All manipulations are performed using aseptic techniques. This study is conducted according to the rules and guidelines of Human Genome Sciences, Inc. Institutional Animal Care and Use Committee and the Guidelines for the Care and Use of Laboratory Animals.

[1076] The wounding protocol is followed according to section A, above. On the day of wounding, animals are anesthetized with an intramuscular injection of ketamine (50 mg/kg) and xylazine (5 mg/kg). The dorsal region of the animal is shaved and the skin washed with 70% ethanol and iodine solutions. The surgical area is dried with sterile gauze prior to wounding. An 8 mm full-thickness wound is created using a Keyes tissue punch. The wounds are left open for the duration of the experiment. Applications of the testing materials are given topically once a day for 7 consecutive days commencing on the day of wounding and subsequent to methylprednisolone administration. Prior to treatment, wounds are gently cleansed with sterile saline and gauze sponges.

[1077] Wounds are visually examined and photographed at a fixed distance at the day of wounding and at the end of treatment. Wound closure is determined by daily measurement on days 1-5 and on day 8. Wounds are measured horizontally and vertically using a calibrated Jameson caliper. Wounds are considered healed if granulation tissue is no longer visible and the wound is covered by a continuous epithelium.

[1078] The agonist or antagonist of the invention is administered using at a range different doses, from 4 mg to 500 mg per wound per day for 8 days in vehicle. Vehicle control groups received 50 mL of vehicle solution.

[1079] Animals are euthanized on day 8 with an intraperitoneal injection of sodium pentobarbital (300 mg/kg). The wounds and surrounding skin are then harvested for histology. Tissue specimens are placed in 10% neutral buffered formalin in tissue cassettes between biopsy sponges for further processing.

[1080] Three groups of 10 animals each (5 with methylprednisolone and 5 without glucocorticoid) are evaluated: 1) Untreated group 2) Vehicle placebo control 3) treated groups.

[1081] Wound closure is analyzed by measuring the area in the vertical and horizontal axis and obtaining the total area of the wound. Closure is then estimated by establishing the differences between the initial wound area (day 0) and that of post treatment (day 8). The wound area on day 1 is 64 mm², the corresponding size of the dermal punch. Calculations are made using the following formula:

[Open area on day 8]-[Open area on day 1]/[Open area on day 1]

[1082] Specimens are fixed in 10% buffered formalin and paraffin embedded blocks are sectioned perpendicular to the wound surface (5 mm) and cut using an Olympus microtome. Routine hematoxylin-eosin (H&E) staining is performed on cross-sections of bisected wounds. Histologic examination of the wounds allows assessment of whether the healing process and the morphologic appearance of the repaired skin is improved by treatment with an agonist or antagonist of the invention. A calibrated lens micrometer is used by a blinded observer to determine the distance of the wound gap.

[1083] Experimental data are analyzed using an unpaired t test. A p value of <0.05 is considered significant.

[1084] The studies described in this example tested activity of agonists or antagonists of the invention. However, one skilled in the art could easily modify the exemplified studies to test the activity of polynucleotides or polypeptides of the invention (e.g., gene therapy).

### EXAMPLE 28

### Lymphadema Animal Model

[1085] The purpose of this experimental approach is to create an appropriate and consistent lymphedema model for testing the therapeutic effects of an agonist or antagonist of the invention in lymphangiogenesis and re-establishment of the lymphatic circulatory system in the rat hind limb. Effectiveness is measured by swelling volume of the affected limb, quantification of the amount of lymphatic vasculature, total blood plasma protein, and histopathology. Acute lymphedema is observed for 7-10 days. Perhaps more importantly, the chronic progress of the edema is followed for up to 3-4 weeks.

[1086] Prior to beginning surgery, blood sample is drawn for protein concentration analysis. Male rats weighing approximately ˜350 g are dosed with Pentobarbital. Subsequently, the right legs are shaved from knee to hip. The shaved area is swabbed with gauze soaked in 70% EtOH. Blood is drawn for serum total protein testing. Circumference and volumetric measurements are made prior to injecting dye into paws after marking 2 measurement levels (0.5 cm above heel, at mid-pt of dorsal paw). The intradermal dorsum of both right and left paws are injected with 0.05 ml of 1% Evan's Blue. Circumference and volumetric measurements are then made following injection of dye into paws.

[1087] Using the knee joint as a landmark, a mid-leg inguinal incision is made circumferentially allowing the femoral vessels to be located. Forceps and hemostats are used to dissect and separate the skin flaps. After locating the femoral vessels, the lymphatic vessel that runs along side and underneath the vessel(s) is located. The main lymphatic vessels in this area are then electrically coagulated or suture ligated.

[1088] Using a microscope, muscles in back of the leg (near the semitendinosis and adductors) are bluntly dissected. The popliteal lymph node is then located. The 2 proximal and 2 distal lymphatic vessels and distal blood supply of the popliteal node are then ligated by suturing. The popliteal lymph node, and any accompanying adipose tissue, is then removed by cutting connective tissues.

[1089] Care is taken to control any mild bleeding resulting from this procedure. After lymphatics are occluded, the skin flaps are sealed by using liquid skin (Vetbond) (AJ Buck). The separated skin edges are sealed to the underlying muscle tissue while leaving a gap of ˜0.5 cm around the leg. Skin also may be anchored by suturing to underlying muscle when necessary.

[1090] To avoid infection, animals are housed individually with mesh (no bedding). Recovering animals are checked daily through the optimal edematous peak, which typically occurred by day 5-7. The plateau edematous peak are then observed. To evaluate the intensity of the lymphedema, the circumference and volumes of 2 designated places on each paw before operation and daily for 7 days are measured. The effect of plasma proteins on lymphedema is determined and whether protein analysis is a useful testing perimeter is also investigated. The weights of both control and edematous limbs are evaluated at 2 places. Analysis is performed in a blind manner.

[1091] Circumference Measurements: Under brief gas anesthetic to prevent limb movement, a cloth tape is used to measure limb circumference. Measurements are done at the ankle bone and dorsal paw by 2 different people and those 2 readings are averaged. Readings are taken from both control and edematous limbs.

[1092] Volumetric Measurements: On the day of surgery, animals are anesthetized with Pentobarbital and are tested prior to surgery. For daily volumetrics animals are under brief halothane anesthetic (rapid immobilization and quick recovery), and both legs are shaved and equally marked using waterproof marker on legs. Legs are first dipped in water, then dipped into instrument to each marked level then measured by Buxco edema software(Chen/Victor). Data is recorded by one person, while the other is dipping the limb to marked area.

[1093] Blood-plasma protein measurements: Blood is drawn, spun, and serum separated prior to surgery and then at conclusion for total protein and Ca2⁺ comparison.

[1094] Limb Weight Comparison: After drawing blood, the animal is prepared for tissue collection. The limbs are amputated using a quillitine, then both experimental and control legs are cut at the ligature and weighed. A second weighing is done as the tibio-cacaneal joint is disarticulated and the foot is weighed.

[1095] Histological Preparations: The transverse muscle located behind the knee (popliteal) area is dissected and arranged in a metal mold, filled with freezeGel, dipped into cold methylbutane, placed into labeled sample bags at −80 EC until sectioning. Upon sectioning, the muscle is observed under fluorescent microscopy for lymphatics.

[1096] The studies described in this example tested activity of agonists or antagonists of the invention. However, one skilled in the art could easily modify the exemplified studies to test the activity of polynucleotides or polypeptides of the invention (e.g., gene therapy).

### EXAMPLE 29

### Suppression of TNF Alpha-induced Adhesion Molecule Expression by an Agonist or Antagonist of the Invention

[1097] The recruitment of lymphocytes to areas of inflammation and angiogenesis involves specific receptor-ligand interactions between cell surface adhesion molecules (CAMs) on lymphocytes and the vascular endothelium. The adhesion process, in both normal and pathological settings, follows a multi-step cascade that involves intercellular adhesion molecule-1 (ICAM-1), vascular cell adhesion molecule-1 (VCAM-1), and endothelial leukocyte adhesion molecule-1 (E-selectin) expression on endothelial cells (EC). The expression of these molecules and others on the vascular endothelium determines the efficiency with which leukocytes may adhere to the local vasculature and extravasate into the local tissue during the development of an inflammatory response. The local concentration of cytokines and growth factor participate in the modulation of the expression of these CAMs.

[1098] Tumor necrosis factor alpha (TNF-a), a potent proinflammatory cytokine, is a stimulator of all three CAMs on endothelial cells and may be involved in a wide variety of inflammatory responses, often resulting in a pathological outcome.

[1099] The potential of an agonist or antagonist of the invention to mediate a suppression of TNF-a induced CAM expression can be examined. A modified ELISA assay which uses ECs as a solid phase absorbent is employed to measure the amount of CAM expression on TNF-a treated ECs when co-stimulated with a member of the FGF family of proteins.

[1100] To perform the experiment, human umbilical vein endothelial cell (HUVEC) cultures are obtained from pooled cord harvests and maintained in growth medium (EGM-2; Clonetics, San Diego, Calif.) supplemented with 10% FCS and 1% penicillin/streptomycin in a 37 degree C. humidified incubator containing 5% CO₂. HUVECs are seeded in 96-well plates at concentrations of 1×10⁴ cells/well in EGM medium at 37 degree C. for 18-24 hrs or until confluent. The monolayers are subsequently washed 3 times with a serum-free solution of RPMI-1640 supplemented with 100 U/ml penicillin and 100 mg/ml streptomycin, and treated with a given cytokine and/or growth factor(s) for 24 h at 37 degree C. Following incubation, the cells are then evaluated for CAM expression.

[1101] Human Umbilical Vein Endothelial cells (HUVECs) are grown in a standard 96 well plate to confluence. Growth medium is removed from the cells and replaced with 90 ul of 199 Medium (10% FBS). Samples for testing and positive or negative controls are added to the plate in triplicate (in 10 ul volumes). Plates are incubated at 37 degree C. for either 5 h (selectin and integrin expression) or 24 h (integrin expression only). Plates are aspirated to remove medium and 100 μl of 0.1% paraformaldehyde-PBS(with Ca++ and Mg++) is added to each well. Plates are held at 4° C. for 30 min.

[1102] Fixative is then removed from the wells and wells are washed 1× with PBS(+Ca,Mg)+0.5% BSA and drained. Do not allow the wells to dry. Add 10 μl of diluted primary antibody to the test and control wells. Anti-ICAM-1-Biotin, Anti-VCAM-1-Biotin and Anti-E-selectin-Biotin are used at a concentration of 10 μg/ml (1:10 dilution of 0.1 mg/ml stock antibody). Cells are incubated at 37° C. for 30 min. in a humidified environment. Wells are washed ×3 with PBS(+Ca,Mg)+0.5% BSA.

[1103] Then add 20 μl of diluted ExtrAvidin-Alkaline Phosphotase (1:5,000 dilution) to each well and incubated at 37° C. for 30 min. Wells are washed ×3 with PBS(+Ca,Mg)+0.5% BSA. 1 tablet of p-Nitrophenol Phosphate pNPP is dissolved in 5 ml of glycine buffer (pH 10.4). 100 μl of pNPP substrate in glycine buffer is added to each test well. Standard wells in triplicate are prepared from the working dilution of the ExtrAvidin-Alkaline Phosphotase in glycine buffer: 1:5,000 (10⁰)>10^{-0.5}>10⁻¹>10^{-1.5} 0.5 μl of each dilution is added to triplicate wells and the resulting AP content in each well is 5.50 ng, 1.74 ng, 0.55 ng, 0.18 ng. 100 μl of pNNP reagent must then be added to each of the standard wells. The plate must be incubated at 37° C. for 4 h. A volume of 50 μl of 3 M NaOH is added to all wells. The results are quantified on a plate reader at 405 nm. The background subtraction option is used on blank wells filled with glycine buffer only. The template is set up to indicate the concentration of AP-conjugate in each standard well [5.50 ng; 1.74 ng; 0.55 ng; 0.18 ng]. Results are indicated as amount of bound AP-conjugate in each sample.

[1104] The studies described in this example tested activity of agonists or antagonists of the invention. However, one skilled in the art could easily modify the exemplified studies to test the activity of polynucleotides or polypeptides of the invention (e.g., gene therapy).

### EXAMPLE 30

### Production Of Polypeptide of the Invention For High-Throughput Screening Assays

[1105] The following protocol produces a supernatant containing polypeptide of the present invention to be tested. This supernatant can then be used in the Screening Assays described in Examples 32-41.

[1106] First, dilute Poly-D-Lysine (644 587 Boehringer-Mannheim) stock solution (1 mg/ml in PBS) 1:20 in PBS (w/o calcium or magnesium 17-516F Biowhittaker) for a working solution of 50 ug/ml. Add 200 ul of this solution to each well (24 well plates) and incubate at RT for 20 minutes. Be sure to distribute the solution over each well (note: a 12-channel pipetter may be used with tips on every other channel). Aspirate off the Poly-D-Lysine solution and rinse with 1 ml PBS (Phosphate Buffered Saline). The PBS should remain in the well until just prior to plating the cells and plates may be poly-lysine coated in advance for up to two weeks.

[1107] Plate 293T cells (do not carry cells past P+20) at 2×10⁵ cells/well in 0.5 ml DMEM(Dulbecco's Modified Eagle Medium)(with 4.5 G/L glucose and L-glutamine (12-604F Biowhittaker))/10% heat inactivated FBS(14-503F Biowhittaker)/1× Penstrep(17-602E Biowhittaker). Let the cells grow overnight.

[1108] The next day, mix together in a sterile solution basin: 300 ul Lipofectamine (18324-012 Gibco/BRL) and 5 ml Optimem I (31985070 Gibco/BRL)/96-well plate. With a small volume multi-channel pipetter, aliquot approximately 2 ug of an expression vector containing a polynucleotide insert, produced by the methods described in Examples 8-10, into an appropriately labeled 96-well round bottom plate. With a multi-channel pipetter, add 50 ul of the Lipofectamine/Optimem I mixture to each well. Pipette up and down gently to mix. Incubate at RT 15-45 minutes. After about 20 minutes, use a multi-channel pipetter to add 150 ul Optimem I to each well. As a control, one plate of vector DNA lacking an insert should be transfected with each set of transfections.

[1109] Preferably, the transfection should be performed by tag-teaming the following tasks. By tag-teaming, hands on time is cut in half, and the cells do not spend too much time on PBS. First, person A aspirates off the media from four 24-well plates of cells, and then person B rinses each well with 0.5-1 ml PBS. Person A then aspirates off PBS rinse, and person B, using a12-channel pipetter with tips on every other channel, adds the 200 ul of DNA/Lipofectamine/Optimem I complex to the odd wells first, then to the even wells, to each row on the 24-well plates. Incubate at 37 degree C. for 6 hours.

[1110] While cells are incubating, prepare appropriate media, either 1%BSA in DMEM with 1× penstrep, or HGS CHO-5 media (116.6 mg/L of CaCl2 (anhyd); 0.00130 mg/L CuSO₄-5H₂O; 0.050 mg/L of Fe(NO₃)₃-9H₂O; 0.417 mg/L of FeSO₄-7H₂O; 311.80 mg/L of Kcl; 28.64 mg/L of MgCl₂; 48.84 mg/L of MgSO₄; 6995.50 mg/L of NaCl; 2400.0 mg/L of NaHCO₃; 62.50 mg/L of NaH₂PO₄—H₂O; 71.02 mg/L of Na₂HPO4; 0.4320 mg/L of ZnSO₄-7H₂O; 0.002 mg/L of Arachidonic Acid ; 1.022 mg/L of Cholesterol; 0.070 mg/L of DL-alpha-Tocopherol-Acetate; 0.0520 mg/L of Linoleic Acid; 0.010 mg/L of Linolenic Acid; 0.010 mg/L of Myristic Acid; 0.010 mg/L of Oleic Acid; 0.010 mg/L of Palmitric Acid; 0.010 mg/L of Palmitic Acid; 100 mg/L of Pluronic F-68; 0.010 mg/L of Stearic Acid; 2.20 mg/L of Tween 80; 4551 mg/L of D-Glucose; 130.85 mg/ml of L- Alanine; 147.50 mg/ml of L-Arginine-HCL; 7.50 mg/ml of L-Asparagine-H₂O; 6.65 mg/ml of L-Aspartic Acid; 29.56 mg/ml of L-Cystine-2HCL-H₂O; 31.29 mg/ml of L-Cystine-2HCL; 7.35 mg/ml of L-Glutamic Acid; 365.0 mg/ml of L-Glutamine; 18.75 mg/ml of Glycine; 52.48 mg/ml of L-Histidine-HCL-H₂O; 106.97 mg/ml of L-Isoleucine; 111.45 mg/ml of L-Leucine; 163.75 mg/ml of L-Lysine HCL; 32.34 mg/ml of L-Methionine; 68.48 mg/ml of L-Phenylalainine; 40.0 mg/ml of L-Proline; 26.25 mg/ml of L-Serine; 101.05 mg/ml of L-Threonine; 19.22 mg/ml of L-Tryptophan; 91.79 mg/ml of L-Tryrosine-2Na-2H₂O; and 99.65 mg/ml of L-Valine; 0.0035 mg/L of Biotin; 3.24 mg/L of D-Ca Pantothenate; 11.78 mg/L of Choline Chloride; 4.65 mg/L of Folic Acid; 15.60 mg/L of i-Inositol; 3.02 mg/L of Niacinamnide; 3.00 mg/L of Pyridoxal HCL; 0.031 mg/L of Pyridoxine HCL; 0.319 mg/L of Riboflavin; 3.17 mg/L of Thiamine HCL; 0.365 mg/L of Thymidine; 0.680 mg/L of Vitamin B₁₂; 25 mM of HEPES Buffer; 2.39 mg/L of Na Hypoxanthine; 0.105 mg/L of Lipoic Acid; 0.081 mg/L of Sodium Putrescine-2HCL; 55.0 mg/L of Sodium Pyruvate; 0.0067 mg/L of Sodium Selenite; 20 uM of Ethanolamine; 0.122 mg/L of Ferric Citrate; 41.70 mg/L of Methyl-B-Cyclodextrin complexed with Linoleic Acid; 33.33 mg/L of Methyl-B-Cyclodextrin complexed with Oleic Acid; 10 mg/L of Methyl-B-Cyclodextrin complexed with Retinal Acetate. Adjust osmolarity to 327 mOsm) with 2 mm glutamine and 1× penstrep. (BSA (81-068-3 Bayer) 100 gm dissolved in 1L DMEM for a 10% BSA stock solution). Filter the media and collect 50 ul for endotoxin assay in 15 ml polystyrene conical.

[1111] The transfection reaction is terminated, preferably by tag-teaming, at the end of the incubation period. Person A aspirates off the transfection media, while person B adds 1.5 ml appropriate media to each well. Incubate at 37 degree C. for 45 or 72 hours depending on the media used: 1%BSA for 45 hours or CHO-5 for 72 hours.

[1112] On day four, using a 300 ul multichannel pipetter, aliquot 600 ul in one 1 ml deep well plate and the remaining supernatant into a 2 ml deep well. The supernatants from each well can then be used in the assays described in Examples 32-39.

[1113] It is specifically understood that when activity is obtained in any of the assays described below using a supernatant, the activity originates from either the polypeptide of the present invention directly (e.g., as a secreted protein) or by polypeptide of the present invention inducing expression of other proteins, which are then secreted into the supernatant. Thus, the invention further provides a method of identifying the protein in the supernatant characterized by an activity in a particular assay.

### EXAMPLE 31

### Construction of GAS Reporter Construct

[1114] One signal transduction pathway involved in the differentiation and proliferation of cells is called the Jaks-STATs pathway. Activated proteins in the Jaks-STATs pathway bind to gamma activation site “GAS” elements or interferon-sensitive responsive element (“ISRE”), located in the promoter of many genes. The binding of a protein to these elements alter the expression of the associated gene.

[1115] GAS and ISRE elements are recognized by a class of transcription factors called Signal Transducers and Activators of Transcription, or “STATs.” There are six members of the STATs family. Stat1 and Stat3 are present in many cell types, as is Stat2 (as response to IFN-alpha is widespread). Stat4 is more restricted and is not in many cell types though it has been found in T helper class I, cells after treatment with IL-12. Stat5 was originally called mammary growth factor, but has been found at higher concentrations in other cells including myeloid cells. It can be activated in tissue culture cells by many cytokines.

[1116] The STATs are activated to translocate from the cytoplasm to the nucleus upon tyrosine phosphorylation by a set of kinases known as the Janus Kinase (“Jaks”) family. Jaks represent a distinct family of soluble tyrosine kinases and include Tyk2, Jak1, Jak2, and Jak3. These kinases display significant sequence similarity and are generally catalytically inactive in resting cells.

[1117] The Jaks are activated by a wide range of receptors summarized in the Table below. (Adapted from review by Schidler and Darnell, Ann. Rev. Biochem. 64:621-51 (1995)). A cytokine receptor family, capable of activating Jaks, is divided into two groups: (a) Class 1 includes receptors for IL-2, IL-3, IL-4, IL-6, IL-7, IL-9, IL-11, IL-12, IL-15,Epo, PRL, GH, G-CSF, GM-CSF, LIF, CNTF, and thrombopoietin; and (b) Class 2 includes IFN-a, IFN-g, and IL-10. The Class 1 receptors share a conserved cysteine motif (a set of four conserved cysteines and one tryptophan) and a WSXWS motif (a membrane proximal region encoding Trp-Ser-Xaa-Trp-Ser (SEQ ID NO: 2)).

[1118] Thus, on binding of a ligand to a receptor, Jaks are activated, which in turn activate STATs, which then translocate and bind to GAS elements. This entire process is encompassed in the Jaks-STATs signal transduction pathway. Therefore, activation of the Jaks-STATs pathway, reflected by the binding of the GAS or the ISRE element, can be used to indicate proteins involved in the proliferation and differentiation of cells. For example, growth factors and cytokines are known to activate the Jaks-STATs pathway (See Table below). Thus, by using GAS elements linked to reporter molecules, activators of the Jaks-STATs pathway can be identified.

| | JAKs | | | | | |
|---|---|---|---|---|---|---|
| Ligand | tyk2 | Jak1 | Jak2 | Jak3 | STATS | GAS (elements) or ISRE |
| IFN family | | | | | | |
| IFN-a/B | + | + | − | − | 1,2,3 | ISRE |
| IFN-g | | + | + | − | 1 | GAS (IRF1 > Lys6 > IFP) |
| I1-10 | + | ? | ? | − | 1,3 | |
| gp130 family | | | | | | |
| IL-6 (Pleiotropic) | + | + | + | ? | 1,3 | GAS (IRF1 > Lys6 > IFP) |
| I1-11 (Pleiotropic) | ? | + | ? | ? | 1,3 | |
| OnM (Pleiotropic) | ? | + | + | ? | 1,3 | |
| LIF (Pleiotropic) | ? | + | + | ? | 1,3 | |
| CNTF (Pleiotropic) | −/+ | + | + | ? | 1,3 | |
| G-CSF (Pleiotropic) | ? | + | ? | ? | 1,3 | |
| IL-12 (Pleiotropic) | + | − | + | + | 1,3 | |
| g-C family | | | | | | |
| IL-2 (lymphocytes) | − | + | − | + | 1,3,5 | GAS |
| IL-4 (lymph/myeloid) | − | + | − | + | 6 | GAS (IRF1 = IFP >> Ly6) (IgH) |
| IL-7 (lymphocytes) | − | + | − | + | 5 | GAS |
| IL-9 (lymphocytes) | − | + | − | + | 5 | GAS |
| IL-13 (lymphocyte) | − | + | ? | ? | 6 | GAS |
| IL-15 | ? | + | ? | + | 5 | GAS |
| gp140 family | | | | | | |
| IL-3 (myeloid) | − | − | + | − | 5 | GAS (IRF1 > IFP >> Ly6) |
| IL-5 (myeloid) | − | − | + | − | 5 | GAS |
| GM-CSF (myeloid) | − | − | + | − | 5 | GAS |
| Growth hormone family | | | | | | |
| GH | ? | − | + | − | 5 | |
| PRL | ? | +/− | + | − | 1,3,5 | |
| EPO | ? | − | + | − | 5 | GAS (B-CAS > IRF1 = IFP >> Ly6) |
| Receptor Tyrosine Kinases | | | | | | |
| EGF | ? | + | + | − | 1,3 | GAS (IRF1) |
| PDGF | ? | + | + | − | 1,3 | |
| CSF-1 | ? | + | + | − | 1,3 | GAS (not IRF1) |

[1119] To construct a synthetic GAS containing promoter element, which is used in the Biological Assays described in Examples 32-33, a PCR based strategy is employed to generate a GAS-SV40 promoter sequence. The 5′ primer contains four tandem copies of the GAS binding site found in the IRF1 promoter and previously demonstrated to bind STATs upon induction with a range of cytokines (Rothman et al., Immunity 1:457-468 (1994).), although other GAS or ISRE elements can be used instead. The 5′ primer also contains 18 bp of sequence complementary to the SV40 early promoter sequence and is flanked with an XhoI site. The sequence of the 5′ primer is:

(SEQ ID NO:3)

5′: GCGCCTCGAGATTTCCCCGAAATCTAGATTTCCCCGAAATGATTTC

CCCGAAATGATTTCCCCGAAATATCTGCCATCTCAATTAG:3′

[1120] The downstream primer is complementary to the SV40 promoter and is flanked with a Hind III site: 5′:GCGGCAAGCTTTTTGCAAAGCCTAGGC:3′ (SEQ ID NO: 4)

[1121] PCR amplification is performed using the SV40 promoter template present in the B-gal:promoter plasmid obtained from Clontech. The resulting PCR fragment is digested with XhoI/Hind III and subcloned into BLSK2-. (Stratagene.) Sequencing with forward and reverse primers confirms that the insert contains the following sequence:

| | |
|---|---|
| 5′:CTCGAGATTTCCCCGAAATCTAGATTTCCCCGAA | (SEQ ID NO:5) |
| ATGATTTCCCCGAAATGATTTCCCCGAAATATCTGCC | |
| ATCTCAATTAGTCAGCAACCATAGTCCCGCCCCTAAC | |
| TCCGCCCATCCCGCCCCTAACTCCGCCCAGTTCCGCC | |
| CATTCTCCGCCCCATGGCTGACTAATTTTTTTTATTT | |
| ATGCAGAGGCCGAGGCCGCCTCGGCCTCTGAGCTATT | |
| CCAGAAGTAGTGAGGAGGCTTTTTTGGAGGCCTAGGC | |
| TTTTGCAAAAAGCTT:3′ | |

[1122] With this GAS promoter element linked to the SV40 promoter, a GAS:SEAP2 reporter construct is next engineered. Here, the reporter molecule is a secreted alkaline phosphatase, or “SEAP.” Clearly, however, any reporter molecule can be instead of SEAP, in this or in any of the other Examples. Well known reporter molecules that can be used instead of SEAP include chloramphenicol acetyltransferase (CAT), luciferase, alkaline phosphatase, B-galactosidase, green fluorescent protein (GFP), or any protein detectable by an antibody.

[1123] The above sequence confirmed synthetic GAS-SV40 promoter element is subcloned into the pSEAP-Promoter vector obtained from Clontech using HindIII and XhoI, effectively replacing the SV40 promoter with the amplified GAS:SV40 promoter element, to create the GAS-SEAP vector. However, this vector does not contain a neomycin resistance gene, and therefore, is not preferred for mammalian expression systems.

[1124] Thus, in order to generate mammalian stable cell lines expressing the GAS-SEAP reporter, the GAS-SEAP cassette is removed from the GAS-SEAP vector using SalI and NotI, and inserted into a backbone vector containing the neomycin resistance gene, such as pGFP-1 (Clontech), using these restriction sites in the multiple cloning site, to create the GAS-SEAP/Neo vector. Once this vector is transfected into mammalian cells, this vector can then be used as a reporter molecule for GAS binding as described in Examples 32-33.

[1125] Other constructs can be made using the above description and replacing GAS with a different promoter sequence. For example, construction of reporter molecules containing EGR and NF-KB promoter sequences are described in Examples 34 and 35. However, many other promoters can be substituted using the protocols described in these Examples. For instance, SRE, IL-2, NFAT, or Osteocalcin promoters can be substituted, alone or in combination (e.g., GAS/NF-KB/EGR, GAS/NF-KB, Il-2/NFAT, or NF-KB/GAS). Similarly, other cell lines can be used to test reporter construct activity, such as HELA (epithelial), HUVEC (endothelial), Reh (B-cell), Saos-2 (osteoblast), HUVAC (aortic), or Cardiomyocyte.

### EXAMPLE 32

### High-Throughput Screening Assay for T-cell Activity.

[1126] The following protocol is used to assess T-cell activity by identifying factors, and determining whether supernate containing a polypeptide of the invention proliferates and/or differentiates T-cells. T-cell activity is assessed using the GAS/SEAP/Neo construct produced in Example 31. Thus, factors that increase SEAP activity indicate the ability to activate the Jaks-STATS signal transduction pathway. The T-cell used in this assay is Jurkat T-cells (ATCC Accession No. TIB-152), although Molt-3 cells (ATCC Accession No. CRL-1552) and Molt-4 cells (ATCC Accession No. CRL-1582) cells can also be used.

[1127] Jurkat T-cells are lymphoblastic CD4+ Th1 helper cells. In order to generate stable cell lines, approximately 2 million Jurkat cells are transfected with the GAS-SEAP/neo vector using DMRIE-C (Life Technologies)(transfection procedure described below). The transfected cells are seeded to a density of approximately 20,000 cells per well and transfectants resistant to 1 mg/ml genticin selected. Resistant colonies are expanded and then tested for their response to increasing concentrations of interferon gamma. The dose response of a selected clone is demonstrated.

[1128] Specifically, the following protocol will yield sufficient cells for 75 wells containing 200 ul of cells. Thus, it is either scaled up, or performed in multiple to generate sufficient cells for multiple 96 well plates. Jurkat cells are maintained in RPMI+10% serum with 1%Pen-Strep. Combine 2.5 mls of OPTI-MEM (Life Technologies) with 10 ug of plasmid DNA in a T25 flask. Add 2.5 ml OPTI-MEM containing 50 ul of DMRIE-C and incubate at room temperature for 15-45 mins.

[1129] During the incubation period, count cell concentration, spin down the required number of cells (10⁷ per transfection), and resuspend in OPTI-MEM to a final concentration of 10⁷ cells/ml. Then add 1 ml of 1×10⁷ cells in OPTI-MEM to T25 flask and incubate at 37 degree C. for 6 hrs. After the incubation, add 10 ml of RPMI+15% serum.

[1130] The Jurkat:GAS-SEAP stable reporter lines are maintained in RPMI+10% serum, 1 mg/ml Genticin, and 1% Pen-Strep. These cells are treated with supernatants containing polypeptide of the present invention or polypeptide of the present invention induced polypeptides as produced by the protocol described in Example 30.

[1131] On the day of treatment with the supernatant, the cells should be washed and resuspended in fresh RPMI+10% serum to a density of 500,000 cells per ml. The exact number of cells required will depend on the number of supernatants being screened. For one 96 well plate, approximately 10 million cells (for 10 plates, 100 million cells) are required.

[1132] Transfer the cells to a triangular reservoir boat, in order to dispense the cells into a 96 well dish, using a 12 channel pipette. Using a 12 channel pipette, transfer 200 ul of cells into each well (therefore adding 100,000 cells per well).

[1133] After all the plates have been seeded, 50 ul of the supernatants are transferred directly from the 96 well plate containing the supernatants into each well using a 12 channel pipette. In addition, a dose of exogenous interferon gamma (0.1, 1.0, 10 ng) is added to wells H9, H10, and H11 to serve as additional positive controls for the assay.

[1134] The 96 well dishes containing Jurkat cells treated with supernatants are placed in an incubator for 48 hrs (note: this time is variable between 48-72 hrs). 35 ul samples from each well are then transferred to an opaque 96 well plate using a 12 channel pipette. The opaque plates should be covered (using sellophene covers) and stored at −20 degree C. until SEAP assays are performed according to Example 36. The plates containing the remaining treated cells are placed at 4 degree C. and serve as a source of material for repeating the assay on a specific well if desired.

[1135] As a positive control, 100 Unit/ml interferon gamma can be used which is known to activate Jurkat T cells. Over 30 fold induction is typically observed in the positive control wells.

[1136] The above protocol may be used in the generation of both transient, as well as, stable transfected cells, which would be apparent to those of skill in the art.

### EXAMPLE 33

### High-Throughput Screening Assay Identifying Myeloid Activity

[1137] The following protocol is used to assess myeloid activity of polypeptide of the present invention by determining whether polypeptide of the present invention proliferates and/or differentiates myeloid cells. Myeloid cell activity is assessed using the GAS/SEAP/Neo construct produced in Example 31. Thus, factors that increase SEAP activity indicate the ability to activate the Jaks-STATS signal transduction pathway. The myeloid cell used in this assay is U937, a pre-monocyte cell line, although TF-1, HL60, or KG1 can be used.

[1138] To transiently transfect U937 cells with the GAS/SEAP/Neo construct produced in Example 31, a DEAE-Dextran method (Kharbanda et. al., 1994, Cell Growth & Differentiation, 5:259-265) is used. First, harvest 2×10⁷ U937 cells and wash with PBS. The U937 cells are usually grown in RPMI 1640 medium containing 10% heat-inactivated fetal bovine serum (FBS) supplemented with 100 units/ml penicillin and 100 mg/ml streptomycin.

[1139] Next, suspend the cells in 1 ml of 20 mM Tris-HCl (pH 7.4) buffer containing 0.5 mg/ml DEAE-Dextran, 8 ug GAS-SEAP2 plasmid DNA, 140 mM NaCl, 5 mM KCl, 375 uM Na₂HPO₄. 7H₂O, 1 mM MgCl₂, and 675 uM CaCl₂. Incubate at 37 degrees C. for 45 min.

[1140] Wash the cells with RPMI 1640 medium containing 10% FBS and then resuspend in 10 ml complete medium and incubate at 37 degree C. for 36 hr.

[1141] The GAS-SEAP/U937 stable cells are obtained by growing the cells in 400 ug/ml G418. The G418-free medium is used for routine growth but every one to two months, the cells should be re-grown in 400 ug/ml G418 for couple of passages.

[1142] These cells are tested by harvesting 1×10⁸ cells (this is enough for ten 96-well plates assay) and wash with PBS. Suspend the cells in 200 ml above described growth medium, with a final density of 5×10⁵ cells/ml. Plate 200 ul cells per well in the 96-well plate (or 1×10⁵ cells/well).

[1143] Add 50 ul of the supernatant prepared by the protocol described in Example 30. Incubate at 37 degee C. for 48 to 72 hr. As a positive control, 100 Unit/ml interferon gamma can be used which is known to activate U937 cells. Over 30 fold induction is typically observed in the positive control wells. SEAP assay the supernatant according to the protocol described in Example 36.

### EXAMPLE 34

### High-Throughput Screening Assay Identifying Neuronal Activity

[1144] When cells undergo differentiation and proliferation, a group of genes are activated through many different signal transduction pathways. One of these genes, EGR1 (early growth response gene 1), is induced in various tissues and cell types upon activation. The promoter of EGR1 is responsible for such induction. Using the EGR1 promoter linked to reporter molecules, activation of cells can be assessed by polypeptide of the present invention.

[1145] Particularly, the following protocol is used to assess neuronal activity in PC12 cell lines. PC12 cells (rat phenochromocytoma cells) are known to proliferate and/or differentiate by activation with a number of mitogens, such as TPA (tetradecanoyl phorbol acetate), NGF (nerve growth factor), and EGF (epidermal growth factor). The EGR1 gene expression is activated during this treatment. Thus, by stably transfecting PC12 cells with a construct containing an EGR promoter linked to SEAP reporter, activation of PC12 cells by polypeptide of the present invention can be assessed.

[1146] The EGR/SEAP reporter construct can be assembled by the following protocol. The EGR-1 promoter sequence (−633 to +1)(Sakamoto K et al., Oncogene 6:867-871 (1991)) can be PCR amplified from human genomic DNA using the following primers:

| | |
|---|---|
| 5′GCGCTCGAGGGATGACAGCGATAGAACCCCGG-3′ | (SEQ ID NO:6) |
| 5′GCGAAGCTTCGCGACTCCCCGGATCCGCCTC-3′ | (SEQ ID NO:7) |

[1147] Using the GAS:SEAP/Neo vector produced in Example 31, EGR1 amplified product can then be inserted into this vector. Linearize the GAS:SEAP/Neo vector using restriction enzymes XhoI/HindIII, removing the GAS/SV40 stuffer. Restrict the EGR1 amplified product with these same enzymes. Ligate the vector and the EGR1 promoter.

[1148] To prepare 96 well-plates for cell culture, two mls of a coating solution (1:30 dilution of collagen type I (Upstate Biotech Inc. Cat#08-115) in 30% ethanol (filter sterilized)) is added per one 10 cm plate or 50 ml per well of the 96-well plate, and allowed to air dry for 2 hr.

[1149] PC12 cells are routinely grown in RPMI-1640 medium (Bio Whittaker) containing 10% horse serum (JRH BIOSCIENCES, Cat. # 12449-78P), 5% heat-inactivated fetal bovine serum (FBS) supplemented with 100 units/ml penicillin and 100 ug/ml streptomycin on a precoated 10 cm tissue culture dish. One to four split is done every three to four days. Cells are removed from the plates by scraping and resuspended with pipetting up and down for more than 15 times.

[1150] Transfect the EGR/SEAP/Neo construct into PC12 using the Lipofectamine protocol described in Example 30. EGR-SEAP/PC12 stable cells are obtained by growing the cells in 300 ug/ml G418. The G418-free medium is used for routine growth but every one to two months, the cells should be re-grown in 300 ug/ml G418 for couple of passages.

[1151] To assay for neuronal activity, a 10 cm plate with cells around 70 to 80% confluent is screened by removing the old medium. Wash the cells once with PBS (Phosphate buffered saline). Then starve the cells in low serum medium (RPMI-1640 containing 1% horse serum and 0.5% FBS with antibiotics) overnight.

[1152] The next morning, remove the medium and wash the cells with PBS. Scrape off the cells from the plate, suspend the cells well in 2 ml low serum medium. Count the cell number and add more low serum medium to reach final cell density as 5×10⁵ cells/ml.

[1153] Add 200 ul of the cell suspension to each well of 96-well plate (equivalent to 1×10⁵ cells/well). Add 50 ul supernatant produced by Example 30, 37 degree C. for 48 to 72 hr. As a positive control, a growth factor known to activate PC12 cells through EGR can be used, such as 50 ng/ul of Neuronal Growth Factor (NGF). Over fifty-fold induction of SEAP is typically seen in the positive control wells. SEAP assay the supernatant according to Example 36.

### EXAMPLE 35

### High-Throughput Screening Assay for T-cell Activity

[1154] NF-KB (Nuclear Factor KB) is a transcription factor activated by a wide variety of agents including the inflammatory cytokines IL-1 and TNF, CD30 and CD40, lymphotoxin-alpha and lymphotoxin-beta, by exposure to LPS or thrombin, and by expression of certain viral gene products. As a transcription factor, NF-KB regulates the expression of genes involved in immune cell activation, control of apoptosis (NF-KB appears to shield cells from apoptosis), B and T-cell development, anti-viral and antimicrobial responses, and multiple stress responses.

[1155] In non-stimulated conditions, NF-KB is retained in the cytoplasm with I-KB (Inhibitor KB). However, upon stimulation, I-KB is phosphorylated and degraded, causing NF-KB to shuttle to the nucleus, thereby activating transcription of target genes. Target genes activated by NF-KB include IL-2, IL-6, GM-CSF, ICAM-1 and class 1 MHC.

[1156] Due to its central role and ability to respond to a range of stimuli, reporter constructs utilizing the NF-KB promoter element are used to screen the supernatants produced in Example 30. Activators or inhibitors of NF-KB would be useful in treating, preventing, and/or diagnosing diseases. For example, inhibitors of NF-KB could be used to treat those diseases related to the acute or chronic activation of NF-KB, such as rheumatoid arthritis.

[1157] To construct a vector containing the NF-KB promoter element, a PCR based strategy is employed. The upstream primer contains four tandem copies of the NF-KB binding site (GGGGACTTTCCC) (SEQ ID NO: 8), 18 bp of sequence complementary to the 5′ end of the SV40 early promoter sequence, and is flanked with an XhoI site:

| | |
|---|---|
| 5′:GCGGCCTCGAGGGGACTTTCCCGGGGACTTTCCG | (SEQ ID NO:9) |
| GGGACTTTCCGGGACTTTCCATCCTGCCATCTCAATT | |
| AG:3′ | |

[1158] The downstream primer is complementary to the 3′ end of the SV40 promoter and is flanked with a Hind III site:

[1159] 5′:GCGGCAAGCTTTTTGCAAAGCCTAGGC:3′ (SEQ ID NO: 4)

[1160] PCR amplification is performed using the SV40 promoter template present in the pB-gal:promoter plasmid obtained from Clontech. The resulting PCR fragment is digested with XhoI and Hind III and subcloned into BLSK2-. (Stratagene) Sequencing with the T7 and T3 primers confirms the insert contains the following sequence:

| | |
|---|---|
| 5′:CTCGAGGGGACTTTCCCGGGGACTTTCCGGGGA | (SEQ ID NO:10) |
| CTTTCCGGGACTTTCCATCTGCCATCTCAATTAGTC | |
| AGCAACCATAGTCCCGCCCCTAACTCCGCCCATCCC | |
| GCCCCTAACTCCGCCCAGTTCCGCCCATTCTCCGCC | |
| CCATGGCTGACTAATTTTTTTTATTTATGCAGAGGC | |
| CGAGGCCGCCTCGGCCTCTGAGCTATTCCAGAAGTA | |
| GTGAGGAGGCTTTTTTGGAGGCCTAGGCTTTTGCAA | |
| AAAGCTT:3′ | |

[1161] Next, replace the SV40 minimal promoter element present in the pSEAP2-promoter plasmid (Clontech) with this NF-KB/SV40 fragment using XhoI and HindIII. However, this vector does not contain a neomycin resistance gene, and therefore, is not preferred for mammalian expression systems.

[1162] In order to generate stable mammalian cell lines, the NF-KB/SV40/SEAP cassette is removed from the above NF-KB/SEAP vector using restriction enzymes SalI and NotI, and inserted into a vector containing neomycin resistance. Particularly, the NF-KB/SV40/SEAP cassette was inserted into pGFP-1 (Clontech), replacing the GFP gene, after restricting pGFP-1 with SalI and NotI.

[1163] Once NF-KB/SV40/SEAP/Neo vector is created, stable Jurkat T-cells are created and maintained according to the protocol described in Example 32. Similarly, the method for assaying supernatants with these stable Jurkat T-cells is also described in Example 32. As a positive control, exogenous TNF alpha (0.1,1, 10 ng) is added to wells H9, H10, and H11, with a 5-10 fold activation typically observed.

### EXAMPLE 36

### Assay for SEAP Activity

[1164] As a reporter molecule for the assays described in Examples 32-35, SEAP activity is assayed using the Tropix Phospho-light Kit (Cat. BP-400) according to the following general procedure. The Tropix Phospho-light Kit supplies the Dilution, Assay, and Reaction Buffers used below.

[1165] Prime a dispenser with the 2.5× Dilution Buffer and dispense 15 ul of 2.5× dilution buffer into Optiplates containing 35 ul of a supernatant. Seal the plates with a plastic sealer and incubate at 65 degree C. for 30 min. Separate the Optiplates to avoid uneven heating.

[1166] Cool the samples to room temperature for 15 minutes. Empty the dispenser and prime with the Assay Buffer. Add 50 ml Assay Buffer and incubate at room temperature 5 min. Empty the dispenser and prime with the Reaction Buffer (see the Table below). Add 50 ul Reaction Buffer and incubate at room temperature for 20 minutes. Since the intensity of the chemiluminescent signal is time dependent, and it takes about 10 minutes to read 5 plates on a luminometer, thus one should treat 5 plates at each time and start the second set 10 minutes later.

[1167] Read the relative light unit in the luminometer. Set H12 as blank, and print the results. An increase in chemiluminescence indicates reporter activity.

Reaction Buffer Formulation:

| # of plates | Rxn buffer diluent (ml) | CSPD (ml) |
|---|---|---|
| 10 | 60 | 3 |
| 11 | 65 | 3.25 |
| 12 | 70 | 3.5 |
| 13 | 75 | 3.75 |
| 14 | 80 | 4 |
| 15 | 85 | 4.25 |
| 16 | 90 | 4.5 |
| 17 | 95 | 4.75 |
| 18 | 100 | 5 |
| 19 | 105 | 5.25 |
| 20 | 110 | 5.5 |
| 21 | 115 | 5.75 |
| 22 | 120 | 6 |
| 23 | 125 | 6.25 |
| 24 | 130 | 6.5 |
| 25 | 135 | 6.75 |
| 26 | 140 | 7 |
| 27 | 145 | 7.25 |
| 28 | 150 | 7.5 |
| 29 | 155 | 7.75 |
| 30 | 160 | 8 |
| 31 | 165 | 8.25 |
| 32 | 170 | 8.5 |
| 33 | 175 | 8.75 |
| 34 | 180 | 9 |
| 35 | 185 | 9.25 |
| 36 | 190 | 9.5 |
| 37 | 195 | 9.75 |
| 38 | 200 | 10 |
| 39 | 205 | 10.25 |
| 40 | 210 | 10.5 |
| 41 | 215 | 10.75 |
| 42 | 220 | 11 |
| 43 | 225 | 11.25 |
| 44 | 230 | 11.5 |
| 45 | 235 | 11.75 |
| 46 | 240 | 12 |
| 47 | 245 | 12.25 |
| 48 | 250 | 12.5 |
| 49 | 255 | 12.75 |
| 50 | 260 | 13 |

### EXAMPLE 37

### High-Throughput Screening Assay Identifying Changes in Small Molecule Concentration and Membrane Permeability

[1168] Binding of a ligand to a receptor is known to alter intracellular levels of small molecules, such as calcium, potassium, sodium, and pH, as well as alter membrane potential. These alterations can be measured in an assay to identify supernatants which bind to receptors of a particular cell. Although the following protocol describes an assay for calcium, this protocol can easily be modified to detect changes in potassium, sodium, pH, membrane potential, or any other small molecule which is detectable by a fluorescent probe.

[1169] The following assay uses Fluorometric Imaging Plate Reader (“FLIPR”) to measure changes in fluorescent molecules (Molecular Probes) that bind small molecules. Clearly, any fluorescent molecule detecting a small molecule can be used instead of the calcium fluorescent molecule, fluo-4 (Molecular Probes, Inc.; catalog no. F-14202), used here.

[1170] For adherent cells, seed the cells at 10,000-20,000 cells/well in a Co-star black 96-well plate with clear bottom. The plate is incubated in a CO₂ incubator for 20 hours. The adherent cells are washed two times in Biotek washer with 200 ul of HBSS (Hank's Balanced Salt Solution) leaving 100 ul of buffer after the final wash.

[1171] A stock solution of 1 mg/ml fluo-4 is made in 10% pluronic acid DMSO. To load the cells with fluo-4, 50 ul of 12 ug/ml fluo-4 is added to each well. The plate is incubated at 37 degrees C. in a CO₂ incubator for 60 min. The plate is washed four times in the Biotek washer with HBSS leaving 100 ul of buffer.

[1172] For non-adherent cells, the cells are spun down from culture media. Cells are resuspended to 2−5×10⁶ cells/ml with HBSS in a 50-ml conical tube. 4 ul of 1 mg/ml fluo-4 solution in 10% pluronic acid DMSO is added to each ml of cell suspension. The tube is then placed in a 37 degrees C. water bath for 30-60 min. The cells are washed twice with HBSS, resuspended to 1×10⁶ cells/ml, and dispensed into a microplate, 100 ul/well. The plate is centrifuged at 1000 rpm for 5 min. The plate is then washed once in Denley Cell Wash with 200 ul, followed by an aspiration step to 100 ul final volume.

[1173] For a non-cell based assay, each well contains a fluorescent molecule, such as fluo-4. The supernatant is added to the well, and a change in fluorescence is detected.

[1174] To measure the fluorescence of intracellular calcium, the FLIPR is set for the following parameters: (1) System gain is 300-800 mW; (2) Exposure time is 0.4 second; (3) Camera F/stop is F/2; (4) Excitation is 488 nm; (5) Emission is 530 nm; and (6) Sample addition is 50 ul. Increased emission at 530 nm indicates an extracellular signaling event caused by the a molecule, either polypeptide of the present invention or a molecule induced by polypeptide of the present invention, which has resulted in an increase in the intracellular Ca⁺⁺ concentration.

### EXAMPLE 38

### High-Throughput Screening Assay Identifying Tyrosine Kinase Activity

[1175] The Protein Tyrosine Kinases (PTK) represent a diverse group of transmembrane and cytoplasmic kinases. Within the Receptor Protein Tyrosine Kinase RPTK) group are receptors for a range of mitogenic and metabolic growth factors including the PDGF, FGF, EGF, NGF, HGF and Insulin receptor subfamilies. In addition there are a large family of RPTKs for which the corresponding ligand is unknown. Ligands for RPTKs include mainly secreted small proteins, but also membrane-bound and extracellular matrix proteins.

[1176] Activation of RPTK by ligands involves ligand-mediated receptor dimerization, resulting in transphosphorylation of the receptor subunits and activation of the cytoplasmic tyrosine kinases. The cytoplasmic tyrosine kinases include receptor associated tyrosine kinases of the src-family (e.g., src, yes, lck, lyn, fyn) and non-receptor linked and cytosolic protein tyrosine kinases, such as the Jak family, members of which mediate signal transduction triggered by the cytokine superfamily of receptors (e.g., the Interleukins, Interferons, GM-CSF, and Leptin).

[1177] Because of the wide range of known factors capable of stimulating tyrosine kinase activity, identifying whether polypeptide of the present invention or a molecule induced by polypeptide of the present invention is capable of activating tyrosine kinase signal transduction pathways is of interest. Therefore, the following protocol is designed to identify such molecules capable of activating the tyrosine kinase signal transduction pathways.

[1178] Seed target cells (e.g., primary keratinocytes) at a density of approximately 25,000 cells per well in a 96 well Loprodyne Silent Screen Plates purchased from Nalge Nunc (Naperville, III). The plates are sterilized with two 30 minute rinses with 100% ethanol, rinsed with water and dried overnight. Some plates are coated for 2 hr with 100 ml of cell culture grade type I collagen (50 mg/ml), gelatin (2%) or polylysine (50 mg/ml), all of which can be purchased from Sigma Chemicals (St. Louis, Mo.) or 10% Matrigel purchased from Becton Dickinson (Bedford, Mass.), or calf serum, rinsed with PBS and stored at 4 degree C. Cell growth on these plates is assayed by seeding 5,000 cells/well in growth medium and indirect quantitation of cell number through use of alamarBlue as described by the manufacturer Alamar Biosciences, Inc. (Sacramento, Calif.) after 48 hr. Falcon plate covers #3071 from Becton Dickinson (Bedford, Mass.) are used to cover the Loprodyne Silent Screen Plates. Falcon Microtest III cell culture plates can also be used in some proliferation experiments.

[1179] To prepare extracts, A431 cells are seeded onto the nylon membranes of Loprodyne plates (20,000/200 ml/well) and cultured overnight in complete medium. Cells are quiesced by incubation in serum-free basal medium for 24 hr. After 5-20 minutes treatment with EGF (60 ng/ml) or 50 ul of the supernatant produced in Example 30, the medium was removed and 100 ml of extraction buffer ((20 mM HEPES pH 7.5, 0.15 M NaCl, 1% Triton X-100, 0.1% SDS, 2 mM Na3VO4, 2 mM Na4P2O7 and a cocktail of protease inhibitors (# 1836170) obtained from Boeheringer Mannheim (Indianapolis, Ind.)) is added to each well and the plate is shaken on a rotating shaker for 5 minutes at 4° C. The plate is then placed in a vacuum transfer manifold and the extract filtered through the 0.45 mm membrane bottoms of each well using house vacuum. Extracts are collected in a 96-well catch/assay plate in the bottom of the vacuum manifold and immediately placed on ice. To obtain extracts clarified by centrifugation, the content of each well, after detergent solubilization for 5 minutes, is removed and centrifuged for 15 minutes at 4 degree C. at 16,000 × g.

[1180] Test the filtered extracts for levels of tyrosine kinase activity. Although many methods of detecting tyrosine kinase activity are known, one method is described here.

[1181] Generally, the tyrosine kinase activity of a supernatant is evaluated by determining its ability to phosphorylate a tyrosine residue on a specific substrate (a biotinylated peptide). Biotinylated peptides that can be used for this purpose include PSK1 (corresponding to amino acids 6-20 of the cell division kinase cdc2-p34) and PSK2 (corresponding to amino acids 1-17 of gastrin). Both peptides are substrates for a range of tyrosine kinases and are available from Boehringer Mannheim.

[1182] The tyrosine kinase reaction is set up by adding the following components in order. First, add 10 ul of 5 uM Biotinylated Peptide, then 10 ul ATP/Mg₂₊ (5 mM ATP/50 mM MgCl₂), then 10 ul of 5× Assay Buffer (40 mM imidazole hydrochloride, pH7.3, 40 mM beta-glycerophosphate, 1 mM EGTA, 100 mM MgCl₂, 5 mM MnCl₂, 0.5 mg/ml BSA), then 5 ul of Sodium Vanadate(1 mM), and then 5 ul of water. Mix the components gently and preincubate the reaction mix at 30 degree C. for 2 min. Initial the reaction by adding 10 ul of the control enzyme or the filtered supernatant.

[1183] The tyrosine kinase assay reaction is then terminated by adding 10 ul of 120 mm EDTA and place the reactions on ice.

[1184] Tyrosine kinase activity is determined by transferring 50 ul aliquot of reaction mixture to a microtiter plate (MTP) module and incubating at 37 degree C. for 20 min. This allows the streptavidin coated 96 well plate to associate with the biotinylated peptide. Wash the MTP module with 300 ul/well of PBS four times. Next add 75 ul of anti-phospotyrosine antibody conjugated to horse radish peroxidase(anti-P-Tyr-POD(0.5 u/ml)) to each well and incubate at 37 degree C. for one hour. Wash the well as above.

[1185] Next add 100 ul of peroxidase substrate solution (Boehringer Mannheim) and incubate at room temperature for at least 5 mins (up to 30 min). Measure the absorbance of the sample at 405 nm by using ELISA reader. The level of bound peroxidase activity is quantitated using an ELISA reader and reflects the level of tyrosine kinase activity.

### EXAMPLE 39

### High-Throughput Screening Assay Identifying Phosphorylation Activity

[1186] As a potential alternative and/or complement to the assay of protein tyrosine kinase activity described in Example 38, an assay which detects activation (phosphorylation) of major intracellular signal transduction intermediates can also be used. For example, as described below one particular assay can detect tyrosine phosphorylation of the Erk-1 and Erk-2 kinases. However, phosphorylation of other molecules, such as Raf, JNK, p38 MAP, Map kinase kinase (MEK), MEK kinase, Src, Muscle specific kinase (MuSK), IRAK, Tec, and Janus, as well as any other phosphoserine, phosphotyrosine, or phosphothreonine molecule, can be detected by substituting these molecules for Erk-1 or Erk-2 in the following assay.

[1187] Specifically, assay plates are made by coating the wells of a 96-well ELISA plate with 0.1 ml of protein G (1 ug/ml) for 2 hr at room temp, (RT). The plates are then rinsed with PBS and blocked with 3% BSA/PBS for 1 hr at RT. The protein G plates are then treated with 2 commercial monoclonal antibodies (100 ng/well) against Erk-1 and Erk-2 (1 hr at RT) (Santa Cruz Biotechnology). (To detect other molecules, this step can easily be modified by substituting a monoclonal antibody detecting any of the above described molecules.) After 3-5 rinses with PBS, the plates are stored at 4 degree C. until use.

[1188] A431 cells are seeded at 20,000/well in a 96-well Loprodyne filterplate and cultured overnight in growth medium. The cells are then starved for 48 hr in basal medium (DMEM) and then treated with EGF (6 ng/well) or 50 ul of the supernatants obtained in Example 30 for 5-20 minutes. The cells are then solubilized and extracts filtered directly into the assay plate.

[1189] After incubation with the extract for 1 hr at RT, the wells are again rinsed. As a positive control, a commercial preparation of MAP kinase (10 ng/well) is used in place of A431 extract. Plates are then treated with a commercial polyclonal (rabbit) antibody (1 ug/ml) which specifically recognizes the phosphorylated epitope of the Erk-1 and Erk-2 kinases (1 hr at RT). This antibody is biotinylated by standard procedures. The bound polyclonal antibody is then quantitated by successive incubations with Europium-streptavidin and Europium fluorescence enhancing reagent in the Wallac DELFIA instrument (time-resolved fluorescence). An increased fluorescent signal over background indicates a phosphorylation by polypeptide of the present invention or a molecule induced by polypeptide of the present invention.

### EXAMPLE 40

### Assay for the Stimulation of Bone Marrow CD34+ Cell Proliferation

[1190] This assay is based on the ability of human CD34+ to proliferate in the presence of hematopoietic growth factors and evaluates the ability of isolated polypeptides expressed in mammalian cells to stimulate proliferation of CD34+ cells.

[1191] It has been previously shown that most mature precursors will respond to only a single signal. More immature precursors require at least two signals to respond. Therefore, to test the effect of polypeptides on hematopoietic activity of a wide range of progenitor cells, the assay contains a given polypeptide in the presence or absence of other hematopoietic growth factors. Isolated cells are cultured for 5 days in the presence of Stem Cell Factor (SCF) in combination with tested sample. SCF alone has a very limited effect on the proliferation of bone marrow (BM) cells, acting in such conditions only as a “survival” factor. However, combined with any factor exhibiting stimulatory effect on these cells (e.g., IL-3), SCF will cause a synergistic effect. Therefore, if the tested polypeptide has a stimulatory effect on hematopoietic progenitors, such activity can be easily detected. Since normal BM cells have a low level of cycling cells, it is likely that any inhibitory effect of a given polypeptide, or agonists or antagonists thereof, might not be detected. Accordingly, assays for an inhibitory effect on progenitors is preferably tested in cells that are first subjected to in vitro stimulation with SCF+IL+3, and then contacted with the compound that is being evaluated for inhibition of such induced proliferation.

[1192] Briefly, CD34+ cells are isolated using methods known in the art. The cells are thawed and resuspended in medium (QBSF 60 serum-free medium with 1% L-glutamine (500 ml) Quality Biological, Inc., Gaithersburg, M Cat# 160-204-101). After several gentle centrifugation steps at 200× g, cells are allowed to rest for one hour. The cell count is adjusted to 2.5×10⁵ cells/ml. During this time, 100 μl of sterile water is added to the peripheral wells of a 96-well plate. The cytokines that can be tested with a given polypeptide in this assay is rhSCF (R&D Systems, Minneapolis, Minn., Cat# 255-SC) at 50 ng/ml alone and in combination with rhSCF and rhIL-3 (R&D Systems, Minneapolis, Minn., Cat# 203-ML) at 30 ng/ml. After one hour, 10 μl of prepared cytokines, 50 μl of the supernatants prepared in Example 30 (supernatants at 1:2 dilution=50 μl) and 20 μl of diluted cells are added to the media which is already present in the wells to allow for a final total volume of 100 μl. The plates are then placed in a 37° C./5% CO₂ incubator for five days.

[1193] Eighteen hours before the assay is harvested, 0.5 μCi/well of [3H] Thymidine is added in a 10 μl volume to each well to determine the proliferation rate. The experiment is terminated by harvesting the cells from each 96-well plate to a filtermat using the Tomtec Harvester 96. After harvesting, the filtermats are dried, trimmed and placed into OmniFilter assemblies consisting of one OmniFilter plate and one OmniFilter Tray. 60 μl Microscint is added to each well and the plate sealed with TopSeal-A press-on sealing film A bar code 15 sticker is affixed to the first plate for counting. The sealed plates are then loaded and the level of radioactivity determined via the Packard Top Count and the printed data collected for analysis. The level of radioactivity reflects the amount of cell proliferation.

[1194] The studies described in this example test the activity of a given polypeptide to stimulate bone marrow CD34+ cell proliferation. One skilled in the art could easily modify the exemplified studies to test the activity of polynucleotides (e.g., gene therapy), antibodies, agonists, and/or antagonists and fragments and variants thereof. As a nonlimiting example, potential antagonists tested in this assay would be expected to inhibit cell proliferation in the presence of cytokines and/or to increase the inhibition of cell proliferation in the presence of cytokines and a given polypeptide. In contrast, potential agonists tested in this assay would be expected to enhance cell proliferation and/or to decrease the inhibition of cell proliferation in the presence of cytokines and a given polypeptide.

[1195] The ability of a gene to stimulate the proliferation of bone marrow CD34+ cells indicates that polynucleotides and polypeptides corresponding to the gene are useful for the diagnosis and treatment of disorders affecting the immune system and hematopoiesis. Representative uses are described in the “Immune Activity” and “Infectious Disease” sections above, and elsewhere herein.

### EXAMPLE 41

### Assay for Extracellular Matrix Enhanced Cell Response (EMECR)

[1196] The objective of the Extracellular Matrix Enhanced Cell Response (EMECR) assay is to identify gene products (e.g., isolated polypeptides) that act on the hematopoietic stem cells in the context of the extracellular matrix (ECM) induced signal.

[1197] Cells respond to the regulatory factors in the context of signal(s) received from the surrounding microenvironment. For example, fibroblasts, and endothelial and epithelial stem cells fail to replicate in the absence of signals from the ECM. Hematopoietic stem cells can undergo self-renewal in the bone marrow, but not in in vitro suspension culture. The ability of stem cells to undergo self-renewal in vitro is dependent upon their interaction with the stromal cells and the ECM protein fibronectin (fn). Adhesion of cells to fn is mediated by the α₅.β₁ and α₄.β₁ integrin receptors, which are expressed by human and mouse hematopoietic stem cells. The factor(s) which integrate with the ECM environment and are responsible for stimulating stem cell self-renewal havea not yet been identified. Discovery of such factors should be of great interest in gene therapy and bone marrow transplant applications

[1198] Briefly, polystyrene, non tissue culture treated, 96-well plates are coated with fn fragment at a coating concentration of 0.2 μg/ cm². Mouse bone marrow cells are plated (1,000 cells/well ) in 0.2 ml of serum-free medium. Cells cultured in the presence of IL-3 (5 ng/ml )+SCF (50 ng/ml ) would serve as the positive control, conditions under which little self-renewal but pronounced differentiation of the stem cells is to be expected. Gene products of the invention (e.g., including, but not limited to, polynucleotides and polypeptides of the present invention, and supernatants produced in Example 30), are tested with appropriate negative controls in the presence and absence of SCF(5.0 ng/ml), where test factor supernatants represent 10% of the total assay volume. The plated cells are then allowed to grow by incubating in a low oxygen environment (5% CO₂, 7% O₂, and 88% N₂) tissue culture incubator for 7 days. The number of proliferating cells within the wells is then quantitated by measuring thymidine incorporation into cellular DNA. Verification of the positive hits in the assay will require phenotypic characterization of the cells, which can be accomplished by scaling up of the culture system and using appropriate antibody reagents against cell surface antigens and FACScan.

[1199] One skilled in the art could easily modify the exemplified studies to test the activity of polynucleotides (e.g., gene therapy), antibodies, agonists, and/or antagonists and fragments and variants thereof.

[1200] If a particular polypeptide of the present invention is found to be a stimulator of hematopoietic progenitors, polynucleotides and polypeptides corresponding to the gene encoding said polypeptide may be useful for the diagnosis and treatment of disorders affecting the immune system and hematopoiesis. Representative uses are described in the “Immune Activity” and “Infectious Disease” sections above, and elsewhere herein. The gene product may also be useful in the expansion of stem cells and committed progenitors of various blood lineages, and in the differentiation and/or proliferation of various cell types.

[1201] Additionally, the polynucleotides and/or polypeptides of the gene of interest and/or agonists and/or antagonists thereof, may also be employed to inhibit the proliferation and differentiation of hematopoictic cells and therefore may be employed to protect bone marrow stem cells from chemotherapeutic agents during chemotherapy. This antiproliferative effect may allow administration of higher doses of chemotherapeutic agents and, therefore, more effective chemotherapeutic treatment.

[1202] Moreover, polynucleotides and polypeptides corresponding to the gene of interest may also be useful for the treatment and diagnosis of hematopoietic related disorders such as, for example, anemia, pancytopenia, leukopenia, thrombocytopenia or leukemia since stromal cells are important in the production of cells of hematopoietic lineages. The uses include bone marrow cell ex-vivo culture, bone marrow transplantation, bone marrow reconstitution, radiotherapy or chemotherapy of neoplasia.

### EXAMPLE 42

### Human Dermal Fibroblast and Aortic Smooth Muscle Cell Proliferation

[1203] The polypeptide of interest is added to cultures of normal human dermal fibroblasts (NHDF) and human aortic smooth muscle cells (AoSMC) and two co-assays are performed with each sample. The first assay examines the effect of the polypeptide of interest on the proliferation of normal human dermal fibroblasts (NHDF) or aortic smooth muscle cells (AoSMC). Aberrant growth of fibroblasts or smooth muscle cells is a part of several pathological processes, including fibrosis, and restenosis. The second assay examines IL6 production by both NHDF and SMC. IL6 production is an indication of functional activation. Activated cells will have increased production of a number of cytokines and other factors, which can result in a proinflammatory or immunomodulatory outcome. Assays are run with and without co-TNFa stimulation, in order to check for costimulatory or inhibitory activity.

[1204] Briefly, on day 1, 96-well black plates are set up with 1000 cells/well (NHDF) or 2000 cells/well (AoSMC) in 100 μl culture media. NHDF culture media contains: Clonetics FB basal media, 1 mg/ml hFGF, 5 mg/ml insulin, 50 mg/ml gentamycin, 2%FBS, while AoSMC culture media contains Clonetics SM basal media, 0.5 μg/ml hEGF, 5 mg/ml insulin, 1 μg/ml hFGF, 50 mg/ml gentamycin, 50 μg/ml Amphotericin B, 5%FBS. After incubation at 37° C. for at least 4-5 hours culture media is aspirated and replaced with growth arrest media. Growth arrest media for NHDF contains fibroblast basal media, 50 mg/ml gentamycin, 2% FBS, while growth arrest media for AoSMC contains SM basal media, 50 mg/ml gentamycin, 50 μg/ml Amphotericin B, 0.4% FBS. Incubate at 37° C. until day 2.

[1205] On day 2, serial dilutions and templates of the polypeptide of interest are designed such that they always include media controls and known-protein controls. For both stimulation and inhibition experiments, proteins are diluted in growth arrest media. For inhibition experiments, TNFa is added to a final concentration of 2 ng/ml (NHDF) or 5 ng/ml (AoSMC). Add ⅓ vol media containing controls or polypeptides of the present invention and incubate at 37 degrees C./5% CO₂ until day 5.

[1206] Transfer 60 μl from each well to another labeled 96-well plate, cover with a plate-sealer, and store at 4 degrees C. until Day 6 (for IL6 ELISA). To the remaining 100 μl in the cell culture plate, aseptically add Alamar Blue in an amount equal to 10% of the culture volume (10 μl). Return plates to incubator for 3 to 4 hours. Then measure fluorescence with excitation at 530 nm and emission at 590 nm using the CytoFluor. This yields the growth stimulation/inhibition data.

[1207] On day 5, the IL6 ELISA is performed by coating a 96 well plate with 50-100 ul/well of Anti-Human IL6 Monoclonal antibody diluted in PBS, pH 7.4, incubate ON at room temperature.

[1208] On day 6, empty the plates into the sink and blot on paper towels. Prepare Assay Buffer containing PBS with 4% BSA. Block the plates with 200 μl/well of Pierce Super Block blocking buffer in PBS for 1-2 hr and then wash plates with wash buffer (PBS, 0.05% Tween-20). Blot plates on paper towels. Then add 50 μl/well of diluted Anti-Human IL-6 Monoclonal, Biotin-labeled antibody at 0.50 mg/ml. Make dilutions of IL-6 stock in media (30, 10, 3, 1, 0.3, 0 ng/ml). Add duplicate samples to top row of plate. Cover the plates and incubate for 2 hours at RT on shaker.

[1209] Plates are washed with wash buffer and blotted on paper towels. Dilute EU-labeled Streptavidin 1:1000 in Assay buffer, and add 100 μl/well. Cover the plate and incubate 1 h at RT. Plates are again washed with wash buffer and blotted on paper towels.

[1210] Add 100 μl/well of Enhancement Solution. Shake for 5 minutes. Read the plate on the Wallac DELFIA Fluorometer. Readings from triplicate samples in each assay were tabulated and averaged.

[1211] A positive result in this assay suggests AoSMC cell proliferation and that the polypeptide of the present invention may be involved in dermal fibroblast proliferation and/or smooth muscle cell proliferation. A positive result also suggests many potential uses of polypeptides, polynucleotides, agonists and/or antagonists of the polynucleotide/polypeptide of the present invention which gives a positive result. For example, inflammation and immune responses, wound healing, and angiogenesis, as detailed throughout this specification. Particularly, polypeptides of the present invention and polynucleotides of the present invention may be used in wound healing and dermal regeneration, as well as the promotion of vasculogenesis, both of the blood vessels and lymphatics. The growth of vessels can be used in the treatment of, for example, cardiovascular diseases. Additionally, antagonists of polypeptides and polynucleotides of the invention may be useful in treating diseases, disorders, and/or conditions which involve angiogenesis by acting as an anti-vascular agent (e.g., anti-angiogenesis). These diseases, disorders, and/or conditions are known in the art and/or are described herein, such as, for example, malignancies, solid tumors, benign tumors, for example hemangiomas, acoustic neuromas, neurofibromas, trachomas, and pyogenic granulomas; artheroscleric plaques; ocular angiogenic diseases, for example, diabetic retinopathy, retinopathy of prematurity, macular degeneration, corneal graft rejection, neovascular glaucoma, retrolental fibroplasia, rubeosis, retinoblastoma, uvietis and Pterygia (abnormal blood vessel growth) of the eye; rheumatoid arthritis; psoriasis; delayed wound healing; endometriosis; vasculogenesis; granulations; hypertrophic scars (keloids); nonunion fractures; scleroderma; trachoma; vascular adhesions; myocardial angiogenesis; coronary collaterals; cerebral collaterals; arteriovenous malformations; ischemic limb angiogenesis; Osler-Webber Syndrome; plaque neovascularization; telangiectasia; hemophiliac joints; angiofibroma; fibromuscular dysplasia; wound granulation; Crohn's disease; and atherosclerosis. Moreover, antagonists of polypeptides and polynucleotides of the invention may be useful in treating anti-hyperproliferative diseases and/or anti-inflammatory known in the art and/or described herein.

[1212] One skilled in the art could easily modify the exemplified studies to test the activity of polynucleotides (e.g., gene therapy), antibodies, agonists, and/or antagonists and fragments and variants thereof.

### EXAMPLE 43

### Cellular Adhesion Molecule (CAM) Expression on Endothelial Cells

[1213] The recruitment of lymphocytes to areas of inflammation and angiogenesis involves specific receptor-ligand interactions between cell surface adhesion molecules (CAMs) on lymphocytes and the vascular endothelium. The adhesion process, in both normal and pathological settings, follows a multi-step cascade that involves intercellular adhesion molecule-1 (ICAM-1), vascular cell adhesion molecule-1 (VCAM-1), and endothelial leukocyte adhesion molecule-1 (E-selectin) expression on endothelial cells (EC). The expression of these molecules and others on the vascular endothelium determines the efficiency with which leukocytes may adhere to the local vasculature and extravasate into the local tissue during the development of an inflammatory response. The local concentration of cytokines and growth factor participate in the modulation of the expression of these CAMs.

[1214] Briefly, endothelial cells (e.g., Human Umbilical Vein Endothelial cells (HUVECs)) are grown in a standard 96 well plate to confluence, growth medium is removed from the cells and replaced with 100 μl of 199 Medium (10% fetal bovine serum (FBS)). Samples for testing and positive or negative controls are added to the plate in triplicate (in 10 μl volumes). Plates are then incubated at 37° C. for either 5 h (selectin and integrin expression) or 24 h (integrin expression only). Plates are aspirated to remove medium and 100 μl of 0.1% paraformaldehyde-PBS(with Ca++ and Mg++) is added to each well. Plates are held at 4° C. for 30 min. Fixative is removed from the wells and wells are washed 1× with PBS(+Ca,Mg)+0.5% BSA and drained. 10 μl of diluted primary antibody is added to the test and control wells. Anti-ICAM-1-Biotin, Anti-VCAM-1-Biotin and Anti-E-selectin-Biotin are used at a concentration of 10 μg/ml (1:10 dilution of 0.1 mg/ml stock antibody). Cells are incubated at 37° C. for 30 min. in a humidified environment. Wells are washed three times with PBS(+Ca,Mg)+0.5% BSA. 20 μl of diluted ExtrAvidin-Alkaline Phosphatase (1:5,000 dilution, referred to herein as the working dilution) are added to each well and incubated at 37° C. for 30 min. Wells are washed three times with PBS(+Ca,Mg)+0.5% BSA. Dissolve 1 tablet of p-Nitrophenol Phosphate pNPP per 5 ml of glycine buffer (pH 10.4). 100 μl of pNPP substrate in glycine buffer is added to each test well. Standard wells in triplicate are prepared from the working dilution of the ExtrAvidin-Alkaline Phosphotase in glycine buffer: 1:5,000(10⁰)>10^{-0.5}>10⁻¹>10^{-1.5}0.5 μl of each dilution is added to triplicate wells and the resulting AP content in each well is 5.50 ng, 1.74 ng, 0.55 ng, 0.18 ng. 100 μl of pNNP reagent is then added to each of the standard wells. The plate is incubated at 37° C. for 4 h. A volume of 50 μl of 3M NaOH is added to all wells. The plate is read on a plate reader at 405 nm using the background subtraction option on blank wells filled with glycine buffer only. Additionally, the template is set up to indicate the concentration of AP-conjugate in each standard well [5.50 ng; 1.74 ng; 0.55 ng; 0.18 ng]. Results are indicated as amount of bound AP-conjugate in each sample.

### EXAMPLE 44

### Alamar Blue Endothelial Cells Proliferation Assay

[1215] This assay may be used to quantitatively determine protein mediated inhibition of bFGF-induced proliferation of Bovine Lymphatic Endothelial Cells (LECs), Bovine Aortic Endothelial Cells (BAECs) or Human Microvascular Uterine Myometrial Cells (UTMECs). This assay incorporates a fluorometric growth indicator based on detection of metabolic activity. A standard Alamar Blue Proliferation Assay is prepared in EGM-2MV with 10 ng/ml of bFGF added as a source of endothelial cell stimulation. This assay may be used with a variety of endothelial cells with slight changes in growth medium and cell concentration. Dilutions of the protein batches to be tested are diluted as appropriate. Serum-free medium (GIBCO SFM) without bFGF is used as a non-stimulated control and Angiostatin or TSP-1 are included as a known inhibitory controls.

[1216] Briefly, LEC, BAECs or UTMECs are seeded in growth media at a density of 5000 to 2000 cells/well in a 96 well plate and placed at 37 degrees C. overnight. After the overnight incubation of the cells, the growth media is removed and replaced with GIBCO EC-SFM. The cells are treated with the appropriate dilutions of the protein of interest or control protein sample(s) (prepared in SFM ) in triplicate wells with additional bFGF to a concentration of 10 ng/ ml. Once the cells have been treated with the samples, the plate(s) is/are placed back in the 37° C. incubator for three days. After three days 10 ml of stock alamar blue (Biosource Cat# DAL1100) is added to each well and the plate(s) is/are placed back in the 37° C. incubator for four hours. The plate(s) are then read at 530 nm excitation and 590 nm emission using the CytoFluor fluorescence reader. Direct output is recorded in relative fluorescence units.

[1217] Alamar blue is an oxidation-reduction indicator that both fluoresces and changes color in response to chemical reduction of growth medium resulting from cell growth. As cells grow in culture, innate metabolic activity results in a chemical reduction of the immediate surrounding environment. Reduction related to growth causes the indicator to change from oxidized (non-fluorescent blue) form to reduced (fluorescent red) form (i.e., stimulated proliferation will produce a stronger signal and inhibited proliferation will produce a weaker signal and the total signal is proportional to the total number of cells as well as their metabolic activity). The background level of activity is observed with the starvation medium alone. This is compared to the output observed from the positive control samples (bFGF in growth medium) and protein dilutions.

### EXAMPLE 45

### Detection of Inhibition of a Mixed Lymphocyte Reaction

[1218] This assay can be used to detect and evaluate inhibition of a Mixed Lymphocyte Reaction (MLR) by gene products (e.g., isolated polypeptides). Inhibition of a MLR may be due to a direct effect on cell proliferation and viability, modulation of costimulatory molecules on interacting cells, modulation of adhesiveness between lymphocytes and accessory cells, or modulation of cytokine production by accessory cells. Multiple cells may be targeted by these polypeptides since the peripheral blood mononuclear fraction used in this assay includes T, B and natural killer lymphocytes, as well as monocytes and dendritic cells.

[1219] Polypeptides of interest found to inhibit the MLR may find application in diseases associated with lymphocyte and monocyte activation or proliferation. These include, but are not limited to, diseases such as asthma, arthritis, diabetes, inflammatory skin conditions, psoriasis, eczema, systemic lupus erythematosus, multiple sclerosis, glomerulonephritis, inflammatory bowel disease, crohn's disease, ulcerative colitis, arteriosclerosis, cirrhosis, graft vs. host disease, host vs. graft disease, hepatitis, leukemia and lymphoma.

[1220] Briefly, PBMCs from human donors are purified by density gradient centrifugation using Lymphocyte Separation Medium (LSM®, density 1.0770 g/ml, Organon Teknika Corporation, West Chester, Pa.). PBMCs from two donors are adjusted to 2×10⁶ cells/ml in RPMI-1640 (Life Technologies, Grand Island, N.Y.) supplemented with 10% FCS and 2 mM glutamine. PBMCs from a third donor is adjusted to 2×10⁵ cells/ml. Fifty microliters of PBMCs from each donor is added to wells of a 96-well round bottom microtiter plate. Dilutions of test materials (50 μl) is added in triplicate to microtiter wells. Test samples (of the protein of interest) are added for final dilution of 1:4; rhuIL-2 (R&D Systems, Minneapolis, Minn., catalog number 202-IL) is added to a final concentration of 1 μg/ml; anti-CD4 mAb (R&D Systems, clone 34930.11, catalog number MAB379) is added to a final concentration of 10 μg/ml. Cells are cultured for 7-8 days at 37° C. in 5% CO₂, and 1 μC of [³H] thymidine is added to wells for the last 16 hrs of culture. Cells are harvested and thymidine incorporation determined using a Packard TopCount. Data is expressed as the mean and standard deviation of triplicate determinations.

[1221] Samples of the protein of interest are screened in separate experiments and compared to the negative control treatment, anti-CD4 mAb, which inhibits proliferation of lymphocytes and the positive control treatment, IL-2 (either as recombinant material or supernatant), which enhances proliferation of lymphocytes.

[1222] One skilled in the art could easily modify the exemplified studies to test the activity of polynucleotides (e.g., gene therapy), antibodies, agonists, and/or antagonists and fragments and variants thereof.

### EXAMPLE 46

### Assays for Protease Activity

[1223] The following, assay may be used to assess protease activity of the polypeptides of the invention.

[1224] Gelatin and casein zymography are performed essentially as described (Heusen et al., Anal. Biochem., 102:196-202 (1980); Wilson et al., Journal of Urology, 149:653-658 (1993)). Samples are run on 10% polyacryamide/0.1% SDS gels containing 1% gelain orcasein, soaked in 2.5% triton at room temperature for 1 hour, and in 0.1M glycine, pH 8.3 at 37° C. 5 to 16 hours. After staining in amido black areas of proteolysis apear as clear areas agains the blue-black background. Trypsin (Sigma T8642) is used as a positive control.

[1225] Protease activity is also determined by monitoring the cleavage of n-a-benzoyl-L-arginine ethyl ester (BAEE) (Sigma B-4500. Reactions are set up in (25 mMNaPO₄, 1 mM EDTA, and 1 mM BAEE), pH 7.5. Samples are added and the change in adsorbance at 260 nm is monitored on the Beckman DU-6 spectrophotometer in the time-drive mode. Trypsin is used as a positive control.

[1226] Additional assays based upon the release of acid-soluble peptides from casein or hemoglobin measured as adsorbance at 280 nm or colorimetrically using the Folin method are performed as described in Bergmeyer, et al., Methods of Enzymatic Analysis, 5 (1984). Other assays involve the solubilization of chromogenic substrates (Ward, Applied Science, 251-317 (1983)).

### EXAMPLE 47

### Identifying Serine Protease Substrate Specificity

[1227] Methods known in the art or described herein may be used to determine the substrate specificity of the polypeptides of the present invention having serine protease activity. A preferred method of determining substrate specificity is by the use of positional scanning synthetic combinatorial libraries as described in GB 2 324 529 (incorporated herein in its entirety).

### EXAMPLE 48

### Ligand Binding Assays

[1228] The following assay may be used to assess ligand binding activity of the polypeptides of the invention.

[1229] Ligand binding assays provide a direct method for ascertaining receptor pharmacology and are adaptable to a high throughput format. The purified ligand for a polypeptide is radiolabeled to high specific activity (50-2000 Ci/mmol) for binding studies. A determination is then made that the process of radiolabeling does not diminish the activity of the ligand towards its polypeptide. Assay conditions for buffers, ions, pH and other modulators such as nucleotides are optimized to establish a workable signal to noise ratio for both membrane and whole cell polypeptide sources. For these assays, specific polypeptide binding is defined as total associated radioactivity minus the radioactivity measured in the presence of an excess of unlabeled competing ligand. Where possible, more than one competing ligand is used to define residual nonspecific binding.

### EXAMPLE 49

### Functional Assay in Xenopus Oocytes

[1230] Capped RNA transcripts from linearized plasmid templates encoding the polypeptides of the invention are synthesized in vitro with RNA polymerases in accordance with standard procedures. In vitro transcripts are suspended in water at a final concentration of 0.2 mg/mi. Ovarian lobes are removed from adult female toads, Stage V defolliculated oocytes are obtained, and RNA transcripts (10 ng/oocytc) are injected in a 50 nl bolus using a microinjection apparatus. Two electrode voltage clamps are used to measure the currents from individual Xenopus oocytes in response polypeptides and polypeptide agonist exposure. Recordings are made in Ca2+ free Barth's medium at room temperature. The Xenopus system can be used to screen known ligands and tissue/cell extracts for activating ligands.

### EXAMPLE 50

### Microphysiometric Assays

[1231] Activation of a wide variety of secondary messenger systems results in extrusion of small amounts of acid from a cell. The acid formed is largely as a result of the increased metabolic activity required to fuel the intracellular signaling process. The pH changes in the media surrounding the cell are very small but are detectable by the CYTOSENSOR microphysiometer (Molecular Devices Ltd., Menlo Park, Calif.). The CYTOSENSOR is thus capable of detecting the activation of polypeptide which is coupled to an energy utilizing intracellular signaling pathway.

### EXAMPLE 51

### Extract/Cell Supernatant Screening

[1232] A large number of mammalian receptors exist for which there remains, as yet, no cognate activating ligand (agonist). Thus, active ligands for these receptors may not be included within the ligands banks as identified to date. Accordingly, the polypeptides of the invention can also be functionally screened (using calcium, cAMP, microphysiometer, oocyte electrophysiology, etc., functional screens) against tissue extracts to identify its natural ligands. Extracts that produce positive functional responses can be sequentially subfractionated until an activating ligand is isolated and identified.

### EXAMPLE 52

### Calcium and cAMP Functional Assays

[1233] Seven transmembrane receptors which are expressed in HEK 293 cells have been shown to be coupled functionally to activation of PLC and calcium mobilization and/or cAMP stimulation or inhibition. Basal calcium levels in the HEK 293 cells in receptor-transfected or vector control cells were observed to be in the normal, 100 nM to 200 nM, range. HEK 293 cells expressing recombinant receptors are loaded with fura 2 and in a single day >150 selected ligands or tissue/cell extracts are evaluated for agonist induced calcium mobilization. Similarly, HEK 293 cells expressing recombinant receptors are evaluated for the stimulation or inhibition of cAMP production using standard cAMP quantitation assays. Agonists presenting a calcium transient or cAMP fluctuation are tested in vector control cells to determine if the response is unique to the transfected cells expressing receptor.

### EXAMPLE 53

### ATP-binding assay

[1234] The following assay may be used to assess ATP-binding activity of polypeptides of the invention.

[1235] ATP-binding activity of the polypeptides of the invention may be detected using the ATP-binding assay described in U.S. Pat. No. 5,858,719, which is herein incorporated by reference in its entirety. Briefly, ATP-binding to polypeptides of the invention is measured via photoaffinity labeling with 8-azido-ATP in a competition assay. Reaction mixtures containing 1 mg/ml of the ABC transport protein of the present invention are incubated with varying concentrations of ATP, or the non-hydrolyzable ATP analog adenyl-5′-imidodiphosphate for 10 minutes at 4° C. A mixture of 8-azido-ATP (Sigma Chem. Corp., St. Louis, Mo.) plus 8-azido-ATP (³²P-ATP) (5 mCi/μmol, ICN, Irvine Calif.) is added to a final concentration of 100 μM and 0.5 ml aliquots are placed in the wells of a porcelain spot plate on ice. The plate is irradiated using a short wave 254 nm UV lamp at a distance of 2.5 cm from the plate for two one-minute intervals with a one-minute cooling interval in between. The reaction is stopped by addition of dithiothreitol to a final concentration of 2 mM. The incubations are subjected to SDS-PAGE electrophoresis, dried, and autoradiographed. Protein bands corresponding to the particular polypeptides of the invention are excised, and the radioactivity quantified. A decrease in radioactivity with increasing ATP or adenly-5′-imidodiphosphate provides a measure of ATP affinity to the polypeptides.

### EXAMPLE 54

### Small Molecule Screening

[1236] This invention is particularly useful for screening therapeutic compounds by using the polypeptides of the invention, or binding fragments thereof, in any of a variety of drug screening techniques. The polypeptide or fragment employed in such a test may be affixed to a solid support, expressed on a cell surface, free in solution, or located intracellularly. One method of drug screening utilizes eukaryotic or prokaryotic host cells which are stably transformed with recombinant nucleic acids expressing the polypeptide or fragment. Drugs are screened against such transformed cells in competitive binding assays. One may measure, for example, the formulation of complexes between the agent being tested and polypeptide of the invention.

[1237] Thus, the present invention provides methods of screening for drugs or any other agents which affect activities mediated by the polypeptides of the invention. These methods comprise contacting such an agent with a polypeptide of the invention or fragment thereof and assaying for the presence of a complex between the agent and the polypeptide or fragment thereof, by methods well known in the art. In such a competitive binding assay, the agents to screen are typically labeled. Following incubation, free agent is separated from that present in bound form, and the amount of free or uncomplexed label is a measure of the ability of a particular agent to bind to the polypeptides of the invention.

[1238] Another technique for drug screening provides high throughput screening for compounds having suitable binding affinity to the polypeptides of the invention, and is described in great detail in European Patent Application 84/03564, published on Sep. 13, 1984, which is herein incorporated by reference in its entirety. Briefly stated, large numbers of different small molecule test compounds are synthesized on a solid substrate, such as plastic pins or some other surface. The test compounds are reacted with polypeptides of the invention and washed. Bound polypeptides are then detected by methods well known in the art. Purified polypeptides are coated directly onto plates for use in the aforementioned drug screening techniques. In addition, non-neutralizing antibodies may be used to capture the peptide and immobilize it on the solid support.

[1239] This invention also contemplates the use of competitive drug screening assays in which neutralizing antibodies capable of binding polypeptides of the invention specifically compete with a test compound for binding to the polypeptides or fragments thereof. In this manner, the antibodies are used to detect the presence of any peptide which shares one or more antigenic epitopes with a polypeptide of the invention.

### EXAMPLE 55

### Phosphorylation Assay

[1240] In order to assay for phosphorylation activity of the polypeptides of the invention, a phosphorylation assay as described in U.S. Pat. No. 5,958,405 (which is herein incorporated by reference) is utilized. Briefly, phosphorylation activity may be measured by phosphorylation of a protein substrate using gamma-labeled ³²P-ATP and quantitation of the incorporated radioactivity using a gamma radioisotope counter. The polypeptides of the invention are incubated with the protein substrate, ³²P-ATP, and a kinase buffer. The 32P incorporated into the substrate is then separated from free ³²P-ATP by electrophoresis, and the incorporated ³²P is counted and compared to a negative control. Radioactivity counts above the negative control are indicative of phosphorylation activity of the polypeptides of the invention.

### EXAMPLE 56

### Detection of Phosphorylation Activity (Activation) of the Polypeptides of the Invention in the Presence of Polypeptide Ligands

[1241] Methods known in the art or described herein may be used to determine the phosphorylation activity of the polypeptides of the invention. A preferred method of determining phosphorylation activity is by the use of the tyrosine phosphorylation assay as described in U.S. Pat. No. 5,817,471 (incorporated herein by reference).

### EXAMPLE 57

### Identification Of Signal Transduction Proteins That Interact With Polypeptides Of The Present Invention

[1242] The purified polypeptides of the invention are research tools for the identification, characterization and purification of additional signal transduction pathway proteins or receptor proteins. Briefly, labeled polypeptides of the invention are useful as reagents for the purification of molecules with which it interacts. In one embodiment of affinity purification, polypeptides of the invention are covalently coupled to a chromatography column. Cell-free extract derived from putative target cells, such as carcinoma tissues, is passed over the column, and molecules with appropriate affinity bind to the polypeptides of the invention. The protein complex is recovered from the column, dissociated, and the recovered molecule subjected to N-terminal protein sequencing. This amino acid sequence is then used to identify the captured molecule or to design degenerate oligonucleotide probes for cloning the relevant gene from an appropriate cDNA library.

### EXAMPLE 58

### IL-6 Bioassay

[1243] To test the proliferative effects of the polypeptides of the invention, the IL-6 Bioassay as described by Marz et al. is utilized (Proc. Natl. Acad. Sci., U.S.A., 95:3251-56 (1998), which is herein incorporated by reference). Briefly, IL-6 dependent B9 murine cells are washed three times in IL-6 free medium and plated at a concentration of 5,000 cells per well in 50 μl, and 50 μl of the IL-6-like polypeptide is added. After 68 hrs. at 37° C., the number of viable cells is measured by adding the tetrazolium salt thiazolyl blue (MTT) and incubating for a further 4 hrs. at 37° C. B9 cells are lysed by SDS and optical density is measured at 570 nm. Controls containing IL-6 (positive) and no cytokine (negative) are utilized. Enhanced proliferation in the test sample(s) relative to the negative control is indicative of proliferative effects mediated by polypeptides of the invention.

### EXAMPLE 59

### Support of Chicken Embryo Neuron Survival

[1244] To test whether sympathetic neuronal cell viability is supported by polypeptides of the invention, the chicken embryo neuronal survival assay of Senaldi et al is utilized (Proc. Natl. Acad. Sci., U.S.A., 96:11458-63 (1998), which is herein incorporated by reference). Briefly, motor and sympathetic neurons are isolated from chicken embryos, resuspended in L15 medium (with 10% FCS, glucose, sodium selenite, progesterone, conalbumin, putrescine, and insulin; Life Technologies, Rockville, Md.) and Dulbecco's modified Eagles medium [with 10% FCS, glutamine, penicillin, and 25 mM Hepes buffer (pH 7.2); Life Technologies, Rockville, Md.], respectively, and incubated at 37° C. in 5% CO₂ in the presence of different concentrations of the purified IL-6-like polypeptide, as well as a negative control lacking any cytokine. After 3 days, neuron survival is determined by evaluation of cellular morphology, and through the use of the colorimetric assay of Mosmann (Mosmann, T., J. Immunol. Methods, 65:55-63 (1983)). Enhanced neuronal cell viability as compared to the controls lacking cytokine is indicative of the ability of the inventive purified IL-6-like polypeptide(s) to enhance the survival of neuronal cells.

### EXAMPLE 60

### Assay for Phosphatase Activity

[1245] The following assay may be used to assess serine/threonine phosphatase (PTPase) activity of the polypeptides of the invention.

[1246] In order to assay for serine/threonine phosphatase (PTPase) activity, assays can be utilized which are widely known to those skilled in the art. For example, the serine/threonine phosphatase (PSPase) activity is measured using a PSPase assay kit from New England Biolabs, Inc. Myelin basic protein (MyBP), a substrate for PSPase, is phosphorylated on serine and threonine residues with cAMP-dependent Protein Kinase in the presence of [³²P]ATP. Protein serine/threonine phosphatase activity is then determined by measuring the release of inorganic phosphate from 32P-labeled MyBP.

### EXAMPLE 61

### Interaction of Serine/Threonine Phosphatases with other Proteins

[1247] The polypeptides of the invention with serine/threonine phosphatase activity as determined in Example 60 are research tools for the identification, characterization and purification of additional interacting proteins or receptor proteins, or other signal transduction pathway proteins. Briefly, labeled polypeptide(s) of the invention is useful as a reagent for the purification of molecules with which it interacts. In one embodiment of affinity purification, polypeptide of the invention is covalently coupled to a chromatography column. Cell-free extract derived from putative target cells, such as neural or liver cells, is passed over the column, and molecules with appropriate affinity bind to the polypeptides of the invention. The polypeptides of the invention -complex is recovered from the column, dissociated, and the recovered molecule subjected to N-terminal protein sequencing. This amino acid sequence is then used to identify the captured molecule or to design degenerate oligonucleotide probes for cloning the relevant gene from an appropriate cDNA library.

### EXAMPLE 62

### Assaying for Heparanase Activity

[1248] In order to assay for heparanase activity of the polypeptides of the invention, the heparanase assay described by Vlodavsky et al is utilized (Vlodavsky, I., et al., Nat. Med., 5:793-802 (1999)). Briefly, cell lysates, conditioned media or intact cells (1×10⁶ cells per 35-mm dish) are incubated for 18 hrs at 37° C., pH 6.2-6.6, with ³⁵S-labeled ECM or soluble ECM derived peak I proteoglycans. The incubation medium is centrifuged and the supernatant is analyzed by gel filtration on a Sepharose CL-6B column (0.9×30 cm). Fractions are eluted with PBS and their radioactivity is measured. Degradation fragments of heparan sulfate side chains are eluted from Sepharose 6B at 0.5<Kₐᵥ<0.8 (peak II). Each experiment is done at least three times. Degradation fragments corresponding to “peak II,” as described by Vlodavsky et al., is indicative of the activity of the polypeptides of the invention in cleaving heparan sulfate.

### EXAMPLE 63

### Immobilization of Biomolecules

[1249] This example provides a method for the stabilization of polypeptides of the invention in non-host cell lipid bilayer constucts (see, e.g., Bieri et al., Nature Biotech 17:1105-1108 (1999), hereby incorporated by reference in its entirety herein) which can be adapted for the study of polypeptides of the invention in the various functional assays described above. Briefly, carbohydrate-specific chemistry for biotinylation is used to confine a biotin tag to the extracellular domain of the polypeptides of the invention, thus allowing uniform orientation upon immobilization. A 50 uM solution of polypeptides of the invention in washed membranes is incubated with 20 mM NaIO4 and 1.5 mg/ml (4 mM) BACH or 2 mg/ml (7.5 mM) biotin-hydrazide for 1 hr at room temperature (reaction volume, 150 ul). Then the sample is dialyzed (Pierce Slidealizer Cassett, 10 kDa cutoff; Pierce Chemical Co., Rockford Ill.) at 4C first for 5 h, exchanging the buffer after each hour, and finally for 12 h against 500 ml buffer R (0.15 M NaCl, 1 mM MgCl2, 10 mM sodium phosphate, pH7). Just before addition into a cuvette, the sample is diluted 1:5 in buffer ROG50 (Buffer R supplemented with 50 mM octylglucoside).

### EXAMPLE 64

### Taqman

[1250] Quantitative PCR (QPCR). Total RNA from cells in culture are extracted by Trizol separation as recommended by the supplier (LifeTechnologies). (Total RNA is treated with DNase I (Life Technologies) to remove any contaminating genomic DNA before reverse transcription.) Total RNA (50 ng) is used in a one-step, 50 ul, RT-QPCR, consisting of Taqman Buffer A (Perkin-Elmer; 50 mM KCl/10 mM Tris, pH 8.3), 5.5 mM MgCl₂, 240 μM each dNTP, 0.4 units RNase inhibitor(Promega), 8%glycerol, 0.012% Tween-20, 0.05% gelatin, 0.3 uM primers, 0.1 uM probe, 0.025 units Amplitaq Gold (Perkin-Elmer) and 2.5 units Superscript II reverse transcriptase (Life Technologies). As a control for genomic contamination, parallel reactions are setup without reverse transcriptase. The relative abundance of (unknown) and 18S RNAs are assessed by using the Applied Biosystems Prism 7700 Sequence Detection System (Livak, K. J., Flood, S. J., Marmaro, J., Giusti, W. & Deetz, K. (1995) PCR Methods Appl. 4, 357-362). Reactions are carried out at 48° C. for 30 min, 95° C. for 10 min, followed by 40 cycles of 95° C. for 15s, 60° C. for 1 min. Reactions are performed in triplicate.

[1251] Primers (f & r) and FRET probes sets are designed using Primer Express Software (Perkin-Elmer). Probes are labeled at the 5′-end with the reporter dye 6-FAM and on the 3′-end with the quencher dye TAMRA (Biosource International, Camarillo, Calif. or Perkin-Elmer).

### EXAMPLE 65

### Assays for Metalloproteinase Activity

[1252] Metalloproteinases (EC 3.4.24.-) are peptide hydrolases which use metal ions, such as Zn²⁺, as the catalytic mechanism. Metalloproteinase activity of polypeptides of the present invention can be assayed according to the following methods.

### Proteolysis of alpha-2-macroglobulin

[1253] To confirm protease activity, purified polypeptides of the invention are mixed with the substrate alpha-2-macroglobulin (0.2 unit/ml; Boehringer Mannheim, Germany) in 1+assay buffer (50 mM HEPES, pH 7.5, 0.2 M NaCl, 10 mM CaCl_{2,} 25 μM ZnCl₂ and 0.05% Brij-35) and incubated at 37° C. for 1-5 days. Trypsin is used as positive control. Negative controls contain only alpha-2-macroglobulin in assay buffer. The samples are collected and boiled in SDS-PAGE sample buffer containing 5% 2-mercaptoethanol for 5-min, then loaded onto 8% SDS-polyacrylamide gel. After electrophoresis the proteins are visualized by silver staining. Proteolysis is evident by the appearance of lower molecular weight bands as compared to the negative control.

### Inhibition of alpha-2-macroglobulin proteolysis by inhibitors of metalloproteinases

[1254] Known metalloproteinase inhibitors (metal chelators (EDTA, EGTA, AND HgCl₂), peptide metalloproteinase inhibitors (TIMP-1 and TIMP-2), and commercial small molecule MMP inhibitors) are used to characterize the proteolytic activity of polypeptides of the invention. The three synthetic MMP inhibitors used are: MMP inhibitor I, [IC₅₀=1.0 μM against MMP-1 and MMP-8; IC₅₀=30, μM against MMP-9; IC₅₀=150 μM against MMP-3]; MMP-3 (stromelysin-1) inhibitor I [IC₅₀=5 μM against MMP-3], and MMP-3 inhibitor II [K₁=130 nM against MMP-3]; inhibitors available through Calbiochem, catalog # 444250, 444218, and 444225, respectively). Briefly, different concentrations of the small molecule MMP inhibitors are mixed with purified polypeptides of the invention (50 μg/ml) in 22.9 μl of 1× HEPES buffer (50 mM HEPES, pH 7.5, 0.2 M NaCl, 10 mM CaCl_{2,} 25 μM ZnCl₂ and 0.05%Brij-35) and incubated at room temperature (24 ° C.) for 2-hr, then 7.1 μl of substrate alpha-2-macroglobulin (0.2 unit/ml) is added and incubated at 37° C. for 20-hr. The reactions are stopped by adding 4× sample buffer and boiled immediately for 5 minutes. After SDS-PAGE, the protein bands are visualized by silver stain.

### Synthetic Fluorogenic Peptide Substrates Cleavage Assay

[1255] The substrate specificity for polypeptides of the invention with demonstrated metalloproteinase activity can be determined using synthetic fluorogenic peptide substrates (purchased from BACHEM Bioscience Inc). Test substrates include, M-1985, M-2225, M-2105, M-2110, and M-2255. The first four are MMP substrates and the last one is a substrate of tumor necrosis factor-α(TNF-α) converting enzyme (TACE). All the substrates are prepared in 1:1 dimethyl sulfoxide (DMSO) and water. The stock solutions are 50-500 μM. Fluorescent assays are performed by using a Perkin Elmer LS 50B luminescence spectrometer equipped with a constant temperature water bath. The excitation λis 328 nm and the emission λis 393 nm. Briefly, the assay is carried out by incubating 176 μl 1× HEPES buffer (0.2 M NaCl, 10 mM CaCl₂, 0.05% Brij-35 and 50 mM HEPES, pH 7.5) with 4 μl of substrate solution (50 μM) at 25° C. for 15 minutes, and then adding 20 μl of a purified polypeptide of the invention into the assay cuvett. The final concentration of substrate is 1 μM. Initial hydrolysis rates are monitored for 30-min.

### EXAMPLE 66

### Characterization of the cDNA Contained in a Deposited Plasmid

[1256] The size of the cDNA insert contained in a deposited plasmid may be routinely determined using techniques known in the art, such as PCR amplification using synthetic primers hybridizable to the 3′ and 5′ ends of the cDNA sequence. For example, two primers of 17-30 nucleotides derived from each end of the cDNA (i.e., hybridizable to the absolute 5′ nucleotide or the 3′ nucleotide end of the sequence of SEQ ID NO:X, respectively) are synthesized and used to amplify the cDNA using the deposited cDNA plasmid as a template. The polymerase chain reaction is carried out under routine conditions, for instance, in 25 ul of reaction mixture with 0.5 ug of the above cDNA template. A convenient reaction mixture is 1.5-5 mM MgCl₂, 0.01% (w/v) gelatin, 20 uM each of dATP, dCTP, dGTP, dTTP, 25 pmol of each primer and 0.25 Unit of Taq polymerase. Thirty five cycles of PCR (denaturation at 94 degree C. for 1 min; annealing at 55 degree C. for 1 min; elongation at 72 degree C. for 1 min) are performed with a Perkin-Elmer Cetus automated thermal cycler. The amplified product is analyzed by agarose gel electrophoresis. The PCR product is verified to be the selected sequence by subcloning and sequencing the DNA product.

[1257] Use of the above methodologies and/or other methodologies known in the art generates fragments from the clone corresponding to the approximate fragments described in Table 8, below. Accordingly, Table 8 provides a physical characterization of certain clones encompassed by the invention. The first column provides the unique clone identifier, “Clone ID NO:Z”, for cDNA clones of the invention, as described in Table 1A. The second column provides the approximate size of the cDNA insert contained in the corresponding cDNA clone.

TABLE 8

| | cDNA |
|---|---|
| Clone ID | Insert |
| NO: Z | Size: |
| HE6FD03 | 900 |
| HPDVO67 | 1100 |
| HFKKS58 | 1400 |
| HUVDR03 | 3100 |
| HFXBN61 | 1200 |
| HELGW31 | 1700 |
| HDJME16 | 1600 |
| HISAR63 | 1600 |
| HAJCL60 | 2000 |
| HNGJI55 | 300 |
| HSDIF59 | 1400 |
| HKABW26 | 700 |
| HE9HE89 | 2100 |
| HDPCN94 | 2800 |
| HACCH94 | 1400 |
| HISAR24 | 1500 |
| HMEKO39 | 2000 |
| H7TBC95 | 700 |
| HTLHP64 | 1400 |
| HODFD73 | 700 |
| HELHP01 | 1400 |
| HTLGH72 | 1000 |
| HTLAB16 | 1300 |
| HBGMZ39 | 500 |
| HTTCB17 | 2200 |
| HTLIT03 | 1300 |
| HE8UY87 | 1000 |
| HMUBV12 | 1900 |
| HMIAH32 | 700 |
| HCE3W04 | 2100 |
| HMUBI80 | 2100 |
| HRABU93 | 2300 |
| HBMXU88 | 1800 |
| HNTCI60 | 3700 |
| HTLDS55 | 1400 |
| HFXCG28 | 1500 |
| HFICR59 | 1000 |
| HPMLJ44 | 1800 |
| HNTCU51 | 2800 |
| HHEJR23 | 1000 |
| HSDHB12 | 700 |
| HLWAR77 | 1300 |
| HWAGC08 | 1500 |
| HNGBQ66 | 1000 |
| HCFLJ17 | 600 |
| HGOCA12 | 1300 |
| HCE5E94 | 1400 |
| HHEEL28 | 2000 |

[1258] It will be clear that the invention may be practiced otherwise than as particularly described in the foregoing description and examples. Numerous modifications and variations of the present invention are possible in light of the above teachings and, therefore, are within the scope of the appended claims.

[1259] The entire disclosure of each document cited (including patents, patent applications, journal articles, abstracts, laboratory manuals, books, or other disclosures) in the Background of the Invention, Detailed Description, and Examples is hereby incorporated herein by reference. In addition, the CD-R copy of the sequence listing submitted herewith and the corresponding computer readable form are both incorporated herein by reference in their entireties. The specification and sequence listing of each of the following U.S. applications are herein incorporated by reference in their entirety: application Ser. No. 60/179,065, filed on Jan. 31, 2000; application Ser. No. 60/180,628, filed on Feb. 4, 2000; application Ser. No. 60/214,886, filed on Jun. 28, 2000; application Ser. No. 60/217,487, filed on Jul. 11, 2000; application Ser. No. 60/225,758, filed on Aug. 14, 2000; application Ser. No. 60/220,963, filed on Jul. 26, 2000; application Ser. No. 60/217,496, filed on Jul. 11, 2000; application Ser. No. 60/225,447, filed on Aug. 14, 2000; application Ser. No. 60/218,290, filed on Jul. 14, 2000; application Ser. No. 60/225,757, filed on Aug. 14, 2000; application Ser. No. 60/226,868, filed on Aug. 22, 2000; application Ser. No. 60/216,647, filed on Jul. 7, 2000; application Ser. No. 60/225,267, filed on Aug. 14, 2000; application Ser. No. 60/216,880, filed on Jul. 7, 2000; application Ser. No. 60/225,270, filed on Aug. 14, 2000; application Ser. No. 60/251,869, filed on Dec. 8, 2000; application Ser. No. 60/235,834, filed on Sep. 27, 2000; application Ser. No. 60/234,274, filed on Sep. 21, 2000; application Ser. No. 60/234,223, filed on Sep. 21, 2000; applicatio Ser. No. 60/228,924, filed on Aug. 30, 2000; application Ser. No. 60/224,518, filed on Aug. 14, 2000; application Ser. No. 60/236,369, filed on Sep. 29, 2000; application Ser. No. 60/224,519, filed on Aug. 14, 2000; application Ser. No. 60/220,964, filed on Jul. 26, 2000; application Ser. No. 60/241,809, filed on Oct. 20, 2000; application Ser. No. 60/249,299, filed on Nov. 17, 2000; application Ser. No. 60/236,327, filed on Sep. 29, 2000; application Ser. No. 60/241,785, filed on Oct. 20, 2000; application Ser. No. 60/244,617, filed on Nov. 1, 2000; application Ser. No. 60/225,268, filed on Aug. 14, 2000; application Ser. No. 60/236,368, filed on Sep. 29, 2000; application Ser. No. 60/251,856, filed on Dec. 8, 2000; application Ser. No. 60/251,868, filed on Dec. 8, 2000; application Ser. No. 60/229,344, filed on Sep. 1, 2000; application Ser. No. 60/234,997, filed on Sep. 25, 2000; application Ser. No. 60/229,343, filed on Sep. 1, 2000; application Ser. No. 60/229,345, filed on Sep. 1, 2000; application Ser. No. 60/229,287, filed on Sep. 1, 2000; application Ser. No. 60/229,513, filed on Sep. 5, 2000; application Ser. No. 60/231,413, filed on Sep. 8, 2000; application Ser. No. 60/229,509, filed on Sep. 5, 2000; application Ser. No. 60/236,367, filed on Sep. 29, 2000; application Ser. No. 60/237,039, filed on Oct. 2, 2000; application Ser. No. 60/237,038, filed on Oct. 2, 2000; application Ser. No. 60/236,370, filed on Sep.29, 2000; application Ser. No. 60/236,802, filed on Oct. 2, 2000; application Ser. No. 60/237,037, filed on Oct. 2, 2000; application Ser. No. 60/237,040, filed on Oct. 2, 2000; application Ser. No. 60/240,960, filed on Oct. 20, 2000; application Ser. No. 60/239,935, filed on Oct. 13, 2000; application Ser. No. 60/239,937, filed on Oct. 13, 2000; application Ser. No. 60/241,787, filed on Oct. 20, 2000; application Ser. No. 60/246,474, filed on Nov. 8, 2000; application Ser. No. 60/246,532, filed on Nov. 8, 2000; application Ser. No. 60/249,216, filed on Nov. 17, 2000; application Ser. No. 60/249,210, filed-on Nov. 17, 2000; application Ser. No. 60/226,681, filed on Aug. 22, 2000; application Ser. No. 60/225,759, filed on Aug. 14, 2000; application Ser. No. 60/225,213, filed on Aug. 14, 2000; application Ser. No. 60/227,182, filed on Aug. 22, 2000; application Ser. No. 60/225,214, filed on Aug. 14, 2000; application Ser. No. 60/235,836, filed on Sep. 27, 2000; application Ser. No. 60/230,438, filed on Sep. 6, 2000; application Ser. No. 60/215,135, filed on Jun. 30, 2000; application Ser. No. 60/225,266, filed on Aug. 14, 2000; application Ser. No. 60/249,218, filed on Nov. 17, 2000; application Ser. No. 60/249,208, filed on Nov. 17, 2000; application Ser. No.60/249,213, filed on Nov. 17, 2000; application Ser. No.60/249,212, filed on Nov. 17, 2000; application Ser. No. 60/249,207, filed on Nov. 17, 2000; application Ser. No. 60/249,245, filed on Nov. 17, 2000; application Ser. No. 60/249,244, filed on Nov. 17, 2000; application Ser. No.60/249,217, filed on Nov. 17, 2000; application Ser. No. 60/249,211, filed on Nov. 17, 2000; application Ser. No. 60/249,215, filed on Nov. 17, 2000; application Ser. No. 60/249,264, filed on Nov. 17, 2000; application Ser. No. 60/249,214, filed on Nov. 17, 2000; application Ser. No. 60/249,297, filed on Nov. 17, 2000; application Ser. No. 60/232,400, filed on Sep. 14, 2000; application Ser. No. 60/231,242, filed on Sep. 8, 2000; application Ser. No. 60/232,081, filed on Sep. 8, 2000; application Ser. No. 60/232,080, filed on Sep. 8, 2000; application Ser. No. 60/231,414, filed on Sep. 8, 2000; application Ser. No. 60/231,244, filed on Sep. 8, 2000; application Ser. No. 60/233,064, filed on Sep, 14, 2000; application Ser. No. 60/233,063, filed on Sep. 14, 2000; application Ser. No. 60/232,397, filed on Sep. 14, 2000; application Ser. No. 60/232,399, filed on Sep. 14, 2000; application Ser. No. 60/232,401, filed on Sep. 14, 2000; application Ser. No. 60/241,808, filed on Oct. 20, 2000; application Ser. No. 60/241,826, filed on Oct. 20, 2000; application Ser. No. 60/241,786, filed on Oct. 20, 2000; application Ser. No. 60/241,221, filed on Oct. 20, 2000; application Ser. No. 60/246,475, filed on Nov. 8, 2000; application Ser. No. 60/231,243, filed on Sep. 8, 2000; application Ser. No. 60/233,065, filed on Sep. 14, 2000; application Ser. No. 60/232,398, filed on Sep. 14, 2000; application Ser. No. 60/234,998, filed on Sep. 25, 2000; application Ser. No. 60/246,477, filed on Nov. 8, 2000; application Ser. No. 60/246,528, filed on Nov. 8, 2000; application Ser. No. 60/246,525, filed on Nov. 8, 2000; application Ser. No. 60/246,476, filed on Nov. 8, 2000; application Ser. No. 60/246,526, filed on Nov. 8, 2000; application Ser. No. 60/249,209, filed on Nov. 17, 2000; application Ser. No. 60/246,527, filed on Nov. 8, 2000; application Ser. No. 60/246,523, filed on Nov. 8, 2000; application Ser. No. 60/246,524, filed on Nov. 8, 2000; application Ser. No. 60/246,478, filed on Nov. 8, 2000; application Ser. No. 60/246,609, filed on Nov. 8, 2000; application Ser. No. 60/246,613, filed on Nov. 8, 2000; application Ser. No. 60/249,300, filed on Nov. 17, 2000; application Ser. No. 60/249,265, filed on Nov. 17, 2000; application Ser. No. 60/246,610, filed on Nov. 8, 2000; application Ser. No. 60/246,611, filed on Nov. 8, 2000; application Ser. No. 60/230,437, filed on Sep. 6, 2000; application Ser. No. 60/251,990, filed on Dec. 8, 2000; application Ser. No. 60/251,988, filed on Dec. 5, 2000; application Ser. No. 60/251,030, filed on Dec. 5, 2000; application Ser. No. 60/251,479, filed on Dec. 6, 2000; application Ser. No. 60/256,719, filed on Dec. 5, 2000; application Ser. No. 60/250,160, filed on Dec. 1, 2000; application Ser. No. 60/251,989, filed on Dec. 8, 2000; application Ser. No. 60/250,391, filed on Dec. 1, 2000; application Ser. No. 60/254,097, filed on Dec. 11, 2000; and application Ser. No. 09/764,854, filed Jan. 17, 2001.

[1260] Moreover, the microfiche copy and the corresponding computer readable form of the Sequence Listing of U.S. application Ser. No. 60/179,065, and the hard copy of and the corresponding computer readable form of the Sequence Listing of U.S. application Ser. No. 60/180,628 are also incorporated herein by reference in their entireties.

The application's sequence listing, which the Patent Office published only in electronic form, follows.

SEQUENCE LISTING (653 sequences)

SEQ ID NO: 1 - DNA, 733 bp, Homo sapiens
gggatccggagcccaaatcttctgacaaaactcacacatgcccaccgtgcccagcacctgaattcgagggtgcaccgtcagtcttcctcttccccccaaaacccaaggacaccctcatgatctcccggactcctgaggtcacatgcgtggtggtggacgtaagccacgaagaccctgaggtcaagttcaactggtacgtggacggcgtggaggtgcataatgccaagacaaagccgcgggaggagcagtacaacagcacgtaccgtgtggtcagcgtcctcaccgtcctgcaccaggactggctgaatggcaaggagtacaagtgcaaggtctccaacaaagccctcccaacccccatcgagaaaaccatctccaaagccaaagggcagccccgagaaccacaggtgtacaccctgcccccatcccgggatgagctgaccaagaaccaggtcagcctgacctgcctggtcaaaggcttctatccaagcgacatcgccgtggagtgggagagcaatgggcagccggagaacaactacaagaccacgcctcccgtgctggactccgacggctccttcttcctctacagcaagctcaccgtggacaagagcaggtggcagcaggggaacgtcttctcatgctccgtgatgcatgaggctctgcacaaccactacacgcagaagagcctctccctgtctccgggtaaatgagtgcgacggccgcgactctagaggat

SEQ ID NO: 2 - protein, 5 aa, Homo sapiens
  misc_feature (3): Xaa equals any of the twenty naturally occurring L- amino acids
WSXWS

SEQ ID NO: 3 - DNA, 86 bp, Artificial Sequence
  Synthetic sequence with 4 tandem copies of the GAS binding site found in the IRF1 promoter (Rothman et al., Immunity 1:457-468 (1994)), 18 nucleotides complementary to the SV40 early promoter, and a Xho I restriction site.
gcgcctcgagatttccccgaaatctagatttccccgaaatgatttccccgaaatgatttccccgaaatatctgccatctcaattag

SEQ ID NO: 4 - DNA, 27 bp, Artificial Sequence
  Synthetic sequence complementary to the SV40 promoter; includes a Hind III restriction site.
gcggcaagctttttgcaaagcctaggc

SEQ ID NO: 5 - DNA, 271 bp, Artificial Sequence
  Synthetic promoter for use in biological assays; includes GAS binding sites found in the IRF1 promoter (Rothman et al., Immunity 1:457-468 (1994)).
ctcgagatttccccgaaatctagatttccccgaaatgatttccccgaaatgatttccccgaaatatctgccatctcaattagtcagcaaccatagtcccgcccctaactccgcccatcccgcccctaactccgcccagttccgcccattctccgccccatggctgactaattttttttatttatgcagaggccgaggccgcctcggcctctgagctattccagaagtagtgaggaggcttttttggaggcctaggcttttgcaaaaagctt

SEQ ID NO: 6 - DNA, 32 bp, Artificial Sequence
  Synthetic primer complementary to human genomic EGR-1 promoter sequence (Sakamoto et al., Oncogene 6:867-871 (1991)); includes a Xho I restriction site.
gcgctcgagggatgacagcgatagaaccccgg

SEQ ID NO: 7 - DNA, 31 bp, Artificial Sequence
  Synthetic primer complementary to human genomic EGR-1 promoter sequence (Sakamoto et al., Oncogene 6:867-871 (1991)); includes a Hind III restriction site.
gcgaagcttcgcgactccccggatccgcctc

SEQ ID NO: 8 - DNA, 12 bp, Homo sapiens
ggggactttccc

SEQ ID NO: 9 - DNA, 73 bp, Artificial Sequence
  Synthetic primer with 4 tandem copies of the NF-KB binding site (GGGGACTTTCCC), 18 nucleotides complementary to the 5' end of the SV40 early promoter sequence, and a XhoI restriction site.
gcggcctcgaggggactttcccggggactttccggggactttccgggactttccatcctgccatctcaattag

SEQ ID NO: 10 - DNA, 256 bp, Artificial Sequence
  Synthetic promoter for use in biological assays; includes NF-KB binding sites.
ctcgaggggactttcccggggactttccggggactttccgggactttccatctgccatctcaattagtcagcaaccatagtcccgcccctaactccgcccatcccgcccctaactccgcccagttccgcccattctccgccccatggctgactaattttttttatttatgcagaggccgaggccgcctcggcctctgagctattccagaagtagtgaggaggcttttttggaggcctaggcttttgcaaaaagctt

SEQ ID NO: 11 - DNA, 642 bp, Homo sapiens
ctgctggtttcattcgaggtttcgggccgaggatgccagcccccatcagattgcgggagctgatccggaccatccggacagcccgaacccaagctgaagaacgagaaatgatccagaaagaatgtgctgcaatccggtcatcttttagagaagaagacaatacataccgatgtcggaatgtggcaaaattactgtatatgcacatgctgggctaccctgctcactttggacagttggagtgcctcaagcttattgcctctcaaaaatttacagacaaacgcattggctatttaggggcaatgctgctgttagatgaaagacaagatgtccatcttctcatgaccaactgtatcaagaatgatcttaatcatagcacgcaattcgtacaggggttagcactttgtaccctcggctgcatgggytsctcagagatgtgcagagatcttgcaggagaggtagagaagctcctgaaaacctycaactcttacttaagaaaaaaggcagcactgtgtgctgttcatgtcatcaggaaagttcctgaacttatggagatgtttttaccagcaacaaaaaatttattggatgagaagaacccatggtgtcctccacacatctgtagtcctcctcaccagaatgtgtgag

SEQ ID NO: 12 - DNA, 401 bp, Homo sapiens
cagatggcggaagcggaatttaaggaccatagtacagctatggatactgaaccaaacccgggaacatcttctgtgtcaacaacaaccagcagtaccaccaccaccaccatcammacttcctctctcgaatgcagcagccacagatctctgtctacagtggttcagaccgacatgctgtacaggtaattcaacaggcattgcatcggccccccagctcagctgctcagtaccttcagcaaatgtatgcagcccaacaacagcacttgatgctgcatamtgcagctcttcagcagcagcatttaagcagctcccagcttgggagccttgctgctgttcaggcaagtttgtccagtggaagaccatctacatctcccacagggaagtgtcacacagcagtcaag

SEQ ID NO: 13 - DNA, 697 bp, Homo sapiens
  misc_feature (591): n equals a,t,g, or c
  misc_feature (642): n equals a,t,g, or c
  misc_feature (658): n equals a,t,g, or c
  misc_feature (691): n equals a,t,g, or c
  misc_feature (695): n equals a,t,g, or c
tagaaatgcatcaggttataacccaataagcccatcatgaagttgaaaaattgtaaattgaaccattgtaattcagatgcttcttgatttaagatgggattatgtcctgataaacccatcataaagccaaaacatcttaaattaaaccatcctaagtcagggacagtctgtaggtagtccagaattgaagtgaattagtggatacccagctggcatctactgtagaattgactgcttacctgatgtgtgtggtaagaccccacccatctggtatcagaattgtgttgtgagagtgtggcaggagaaactgagtctgtttattcctgtatacacacagggcttcgtgctgtgtcactccatcgctgggggtacgggttctggcctgggctcctacctcctggagcgactgaatgacaggcaagcctgtgtttggggagagggcattaaccctggttccctgagtaatgtcattgcttttttctcttgagctagaaagtctgccactaccccttttgagtcatagggacagacccacccaaggaccatgttggaagctattttggggggtgggggtttacctgtggaggggangggatctacagagtttgaaagctttcaggcttatcctttttggctctgaanactcagttctgccctnaccccttttgtacaaaatggccatatgggcagngatnga

SEQ ID NO: 14 - DNA, 439 bp, Homo sapiens
  misc_feature (48): n equals a,t,g, or c
  misc_feature (292): n equals a,t,g, or c
  misc_feature (429): n equals a,t,g, or c
tgtcttatgctagagttggtagaagaatacagactgacagtgaaaganagctactgcatttttgaatctggaacctgaccgatgctatcaagtgtgggtgatggctgtgaacttcactggatgtagcctgcccagtgaaagggccatctttaggacaggtaaggagatggatgctaagggtgcattagaagacaacgctcagttcttcacagactcttgagatcagccagtaagtgtttattaagcacctattgtgtgttgagtgttgtgcaaagtgctggttatacaacgntgacttaagcctggggtcctgttctcargaagctcatgctcaggtggggagatggaaaaacagaggatcatagaaaatgtgtggtaagggccatatccagatatacacaggttattatgagaacactccagaggggncacccaagtt

SEQ ID NO: 15 - DNA, 663 bp, Homo sapiens
  misc_feature (55): n equals a,t,g, or c
  misc_feature (555): n equals a,t,g, or c
  misc_feature (561): n equals a,t,g, or c
  misc_feature (587): n equals a,t,g, or c
  misc_feature (656): n equals a,t,g, or c
  misc_feature (658): n equals a,t,g, or c
ggcacgagcagaaacctcctcaacgcactcagaatctcctgtggttgtggacctnccggacacccccttcatctttaagcacaccgtcaacaattccacagctgtratttcctggacctacgccttgggcaagcarccggtcagtttctaccagcycctgttacaggaggtggccaagacacaggagaatgagttgcccgaggcaaagaatcgtccatggatcttcaacaagattttgggcactactgtcaagctgatggagctaaagcctwacacgtgttactgcctcagtgtccgtgcagccaacacagctggggtggggaagtggtgcaagccctacaaatttgcaaccctggccactgacttcagcagctttcctgagaactaccccatccagatcaccgtgcggcgcaaggaaccccggcaaaagatcgtgtcatcgggcccggaggagatgccggaggctggaggatctggaatacctatttcctggtaagggggagggccccaggacacccctaactactttcagcttcaacccaggcccttaaaaancagaanccttgagacctaacattccaaccagnaaccttgcgggccccggggtctggcaaaatgggattgggcacccaaaccctgggcttggggcccaaggntncataa

SEQ ID NO: 16 - DNA, 851 bp, Homo sapiens
cggcaattcaatcgggaaatgaagcggaagcaggcggagtccgagaggcccatcttgccagccaatcagaagctcattactttatcagtgcaagatgcacccacaaagaaagagtttgttattaaccccaacgggaaatccgaggtctgcatcctgcacgagtacatgcagcgtgtcctcaaggtccgccctgtctataatttctttgaatgtgagaacccaagtgagccttttggtgcctcggtgaccattgatggtgtgacttacggatctggaactgcaagcagcaaaaaacttgcgaagaataaagctgcccgagctacactggaaatcctcatccctgactttgttaaacagacctctgaagagaagcccaaagacagtgaagaactcgagtattttaaccacatcagcatcgaggactcgcgggtctacgagctgaccagcaagatggtcaagcaggagacatcggacaagagtgtgattgagctgcagcagtatgccaagaagaacaagcccaacctgcacatcctcagcaagctccaagaggagatgaagaggctagctgaggaaagggaggagactcgaaagaagcccaagatgtccattgtggcgtccgcccagcctggcggtgagcccctgtgcaccgtggacgtgtgagggaggtgcgcccccccccccccccacccgtctgccaagcatgggtatgaatcgtgcacacagccatgcttcaaggccggggcaggggagcctgtgctgatgccatccagggcactgggctgtgcctggaaggcgagccttgattgtctgaacacataaagcaaactgtccagaaaaaaaaaaaaaaaaaa

SEQ ID NO: 17 - DNA, 1183 bp, Homo sapiens
  misc_feature (72): n equals a,t,g, or c
ctgtaatatctctttggaaattcaagattgaacctggtcctaggttgtggccccaggcattgggcattttgnaagccccccaggtgttttcagcttgcagccaggccgagagagagcccctgagtcagatccccatggtttaggcacacctagcgggaggggtggctcctggaccccaccgtggttggagagctgagcatgtgtgtggctttagtggggtctgttagttatgggggtctgggcactggagctgcaggacacttgggatcccaggtcagaaagggccagatgagcaactaggaaagacttgggggccagggcggagtggggtcacctgacactcttgtgaggccccttctagtgcctgctcacaccggaatttcattcactccaagaagccatcaggggtaagataccttcctttaaacgtcactaagaaagaagaggcctgccggtgacacagtaagatgccattgatctaaagatgcgtcttgatttcagaaaggtccggaagtggaaagcaggtttcagggctgctgaggtacagggttctcctgtaggccccagggatggtctcaggggtgctgagtgcgtgcgtggtaaatggatggagcccaggggcgcctcctgccagtgtcctccaggcactcaaacctagcccttctgaagccgacctcacgtgacctcacagcccctcctgaaggcgcctcactgatgacggtgggtggaataacagcccccagagatgtccaggtttggaaccccaggacgtgggaaagtgttaccttgcgtggcaaaagggacccggcgcctgtgcttcagttcaggatttcgtggtggggagatgaccgtggatggttgaggtgggccctgagtaatcatgggggcccttataagggaaggggagtcacgagggtctgcgcatgaagcaaggaagcttctggctgtgaagatggcaagaargcctggggccaggcgatgaggtggcccctggaggagctggaaaaggcattggattctgccccagagcctccgtggagaaacaaagccgcactgacaagacttcagcctggtgaaaaccattttggactcctgacctctagaactgtaagataataaattggtgtggttttcaacctctcaaaaaaaaaaaaaaaaaaaaaaaaaaaaaaaaaaaaaaaaa

SEQ ID NO: 18 - DNA, 1048 bp, Homo sapiens
  misc_feature (491): n equals a,t,g, or c
  misc_feature (1014): n equals a,t,g, or c
  misc_feature (1026): n equals a,t,g, or c
  misc_feature (1040): n equals a,t,g, or c
atgagatccggcagtttgcacggttcatgacagaaaagctgaacgtgagccacacaggagtccccctaggcgaggagtacattctggtctttagccgaacccagaacagactcattctgaatgaggcagagctgctgctggcactggcccaggagttccagatgaagacagtgacagtgtccctggaggaccacacctttgctgatgtcgtgcggctggtcagcaatgcctccatgctggtcagcatgcatggggcccagctggtcaccaccctcttcctgccccgtggggcaactgtggtagagctcttcccatatgctgtcaatcccgaccactacactccctataagacgctggccatgctgcctggcatggacctccagtatgtagcctggcggaacatgatgccagagaacacagtcacacaccctgagcggccctgggatcaggggggcatcacccatctggaccgggctgagcaagcccttatncctgcaaagccgtgaggtcccacggcatctctgttgccggaaccccgagtggctcttccgaatctaccaggacaccaaggtggacatcccatccctcattcaaaccatacggcgcgtggtgaagggccggccaggaccacggaagcagaagtggacagtcggcctatatccaggcaaggtgcgggaggcacggtgccaggcgtcagtgcatggcgcctccgaggcccgcctcactgtctcctggcagatcccatggaaccttaaatacctgaaggtgagggaggtgaagtacgaggtgtggctgcaggagcagggggagaacacctacgtgccttacatcctggctctgcagaaccacaccttcaytgagaacatcaagcccttcaccacctacctggtgtgggtccgytgcatcttcaacaagatcctcctgggacccttttgcagatgttgcttggtgttgcaaasgtagcgagcaggccacarcctggccttcggggaggttggtttcctgcattttcanggttccctgggnccattaattcccantttgggga

SEQ ID NO: 19 - DNA, 677 bp, Homo sapiens
  misc_feature (576): n equals a,t,g, or c
  misc_feature (587): n equals a,t,g, or c
  misc_feature (596): n equals a,t,g, or c
  misc_feature (617): n equals a,t,g, or c
  misc_feature (656): n equals a,t,g, or c
  misc_feature (659): n equals a,t,g, or c
tcgacccacgcgtccgggctgggagaggaaagccatggctgacaagatcctgaaggacagacggaggctgtttgtcagctcagtgagccccgggaccctcagcagcttgctggcatgagctcttagacaaaaaagtgctaaaccaggaggagatggagagagtgagatgcgaaaacgctaccacgatggacaaggcccgggctctgatcgactccatcattcggaaagggccacaggcctgccagattcttattgcttttatttgcgcagaggattctttcctcgcagagaagctggagctctcaggtccgccatctggaagtcagcttaacacagactctgaagcagcacctcttcctgcaccagcttctgaggacaccgtgcctgggccacatgaaccagaagaacctcccaatacgctcaagctttgtcctcatgaagaattcgtgaaactctctaaaaaaaaggctgcagagatctacccaataaaggagagaaacgatcgtactcggctggctytcatcatatgcaatatagagttcgatcatctttccgcccaggaatggggccgaaacnggacattgcanggatgaagnaatctattggaaggcctcggntacaagtgtggaccttgaaacagaaacttcactggtcanggnatggaagccagaacctgc

SEQ ID NO: 20 - DNA, 595 bp, Homo sapiens
  misc_feature (399): n equals a,t,g, or c
gcagggaactgtgccctacctgggcaccttcctgactgacctgaccatgcttgacactgcccttcaggactacatcgagggtggactgataaactttgagaaaaggagaagggaatttgaagtgattgcccagataaagctcttacagtctgcctgcaacagctattgcatgaccccagaccaaaagttcatccagtggttccagaggcagcagctcctgacagaggaggagagctatgccctgtcatgtgagattgaagcagctgctgatgccagcaccacctcgcccaagcctcggaagagcatggtgaagagactcagcctactgtttctagggtctgacatgatcaccagtcccactcccaccaaagagcagcccaagtccactgccagcgggantctggtgaaagcatggactctgtcagcgtgtcatcctgcgagtcgaaccactcagaggctgaggagggctacattactcccatggacacccctgatgagcctcaaaaaaagctctctgagtcctcctcatmctgttcttctatccattccatggacacaaattcctcagggatgtcttccttaatcaaccccctct

SEQ ID NO: 21 - DNA, 886 bp, Homo sapiens
  misc_feature (808): n equals a,t,g, or c
ggttttgtgtcaggtcagtcagcgaggctggggtaggcgagagctcagccgccaccgagcccatcagggtcaagcaggctctggctaccccgtctgccccatatggctttgccctcctgaactgcgggaagaatgaaatggtcattgggtggaaaccccccaagcgtcgtggaggtggcaagatcctgggctacttcctggaccagcatgactcggaagagctggactggcatgcggtsratcagcagcccatccccacccgggtctgcaaggtcagtgaccttcatgaaggccacttctatgagttccgtgcccgggctgccaactgggcaggtgttggcgagctgtcggcacccagcagcctgtttgagtgcaaagagtggacaatgccccagccaggccccccgtacgatgtacgggcatccgaggtgcgggccacatccctggtgctgcagtgggaacccccactgtatatgggggctgggcctgtcacaggctatcacgtcagtttccaggaggaaggctctgagcagtggaagccggtcacctcaggccccatctctggcacccacctgagggtttccgacttgcagccaggaaagagttacgtgttccaggtacaggccatgaattcagctggtctggggcaaccgtccatgcccactgatcccgtgctcctggaggacaagccaggtgcccatgagatcgaggttggtgtggatgaagagggctttatctatttggcttttgaagcccctgaagccccgagtcctcagagttcagtgggtccaaaagaatacaaagggcncaatggaaccccagagggtcaagatcgaaggtaaagttaacaagtccaaggtcatctgaaaaaaaccgggctcgagga

SEQ ID NO: 22 - DNA, 1149 bp, Homo sapiens
cccacgcgtccgagcggagccgtgaggacctctcagctctgacccgacagggccgctacccgccctacgaacgagtggtgttgcgagaagccagtttcaagcgcccggtagtgatcctgggacccgtggccgacattgctatgcagaagttgactgctgagatgcctgaccagtttgaaatcgcagagactgtgtccaggaccgacagcccctccaagatcatcaaactagacaccgtgcgggtgattgcagaaaaagacaagcatgcgctcctggatgtgaccccctccgccatcgagcgcctcaactatgtgcagtactaccccattgtggtcttcttcatccccgagagccggccggccctcaaggcactgcgccagtggctggcgcctgcctcccgccgcagcacccgtcgcctctacgcacaagcccagaagctgcgaaaacacagcagccacctcttcacagccaccatccctctgaatggcacgagtgacacctggtaccaggagctcaaggccatcattcgagagcagcagacgcggcccatctggacggcggaagatcagctggatggctccttggaggacaacctagacctccctcaccacggcctggccgacagctccgctgacctcagctgcgacagccgcgttaacagcgactacgagacggacggcgagggcggcgcgtacacggatggcgagggctacacagacggcgagggggggccctacacggatgtggatgatgagcccccggctccagccctggcccggtcctcggagcccgtgcaggcagatgagtcccagagcccgagggatcgtgggagaatctcggctcatcagggggcccaggtggacagccgccacccccagggacagtggcgacaggacagcatgcgaacctatgaacgggaagccctgaagaaaaagtttatgcgagtacatgatgcggagtcctccgatgaagacggctatgactggggtccggccactgacctgtgacctctcgaaggctgccagctggtccgtcctccttctccctccctggggctgggactcagtttcccatacagaacccacaaccttacctccctccgcctggtctttaataaacagagtattttcacaaaaaaaaaaaaaaaaa

SEQ ID NO: 23 - DNA, 1458 bp, Homo sapiens
gggctgcaggaattcggcacgaggcaacctatcggactgccattgttcagaatcagcaccttgccatgctagcaaagaaacttgaactggatcgatttatgctgtatgctcacgggcctgacctttgtagagaatcggaccttcgacatgcaatggccaattgttttgaagcgttaataggagctgtttacttggagggaagcctggaggaagccaagcagttatttggacgcttgctctttaatgatccggacctgcgcgaagtctggctcaattatcctctccacccactccaactacaagagccaaatactgatcgacaacttattgaaacttctccggttctacaaaaacttactgagtttgaagaagcaattggagtaatttttactcatgtcgacttctggcaagggcattcacattgagaactgtgggatttaaccatctgaccctaggccacaatcagagaatggaattcctaggtgactccataatgcaactggtagccacagagtacttattcattcatttcccagatcatcatgaaggacacttaactttgttgcgaagctctttggtgaataatagaactcaggccaaggtagcggaggagctgggcatgcaggagtacgccataaccaacgacaagaccaagaggcctgtggcgcttcgcaccaagaccttggcggaccttttggaatcatttattgcagcgctgtacattgataaggatttggaatatgttcatactttcatgaatgtctgcttctttccacgattgaaagagttcattttgaatcaggattggaatgaccccaaatcccagcttcagcagtgttgcttgacacttaggacagaaggaaaagagccagacattcctctgtacaagactctgcagacagtgggcccatcccatgcccgaacctacactgtggctgtttatttcaagggagaaagaataggctgtgggaaaggaccaagtattcagcaagcggaaatgggagcagcaatggatgcgcttgaaaaatataattttccccagatggcccatcagaagcggttcatcgaacggaagtacagacaagagttaaaagaaatgaggtgggaaagagagcatcaagagagagagccagatgagactgaagacatcaagaaataaaggagggcatgcaagtgtggagtatttacttgctcagtaactgtgactgttgtctattgagacctagcctagttttcctgcagacaatgaacgaagtgtgctcattgaaataaaatacagagtcaaatcgctattgttgttttaatgatctgtttttagctggatggtctttattacaaagtattagatttttcttctatttaacggaaaacttgactttggtgaatgtgcattacttccttttattttgctctttaaataataaaattcaagaagcataaaaaaaaaaaaaaaaaaac

SEQ ID NO: 24 - DNA, 1378 bp, Homo sapiens
tcgacccacgcgtccgctgatacccaggagtctccagcttccaagagaggtcgggtcacagccagcagctatgtctgacataaatcttgactgggttgacaggcgtcagttgcagcgcttggaggaaatgctgattgttgtggatgagaatgataaggttattggtgccgacaccaagaggaattgccatctgaacgaaaacattgagaaagggctgctgcaccgagccttcagcgttgtcttgtttaacaccaagaatcgaatcctgatacagcagaggtcggacacgaaagtcacgtttcctgggtattttaccgactcctgtagtagccacccattatacaacccagcagaactggaagaaaaggatgccatcggagtgaggagggcagcccagaggcgtctgcaagcagagctgggaattcctggggagcagatttctccagaggacattgtgttcatgacaatctatcaccacaaggcaaaatcagacagaatttggggagagcatgaaatttgttaccttctgcttgtgaggaaaaacgtcactctgaacccggatcccagtgaaacgaaaagcatcctctacctgtcccaggaggagctgtgggagctgctggagagggaggcgaggggtgaagtcaaagtcaccccctggctaagaaccattgccgagaggtttctgtaccggtggtggcctcacctggatgacgtgaccccgtttgtggagcttcacaaaatacacagagtgtgagaggcagggaggtcgagtcagccatgtgtaatgccctcagtgcaggcagaagcaccattgaggcaatgatacaccctctccaaaaaacagggcaaaaggggcacttgattgcccatcatgtataaatcactatttcaaccttttcatcaactttgtcatatcttcattttcccttttccttatttccatatttctcatctgcctggttgcagggaggaaatttaacatttcctttgtcccaatttccattttataagcacttgttcgattaacagcagctgatcctgaaagtcttggggagatcttgagagtcctgaagcaggcagactagcctggctggaccatgaggctgtctccccacagctttatccaagcctccaaggtcaggatgggatctctgtatcatgtttttctttttaaatcacttatttcagagtgcaacacaaggctgcatttttaaaaaaaagacacattcaatcttgcatcctaatacaagcagtacggaagatgcgtatgatctcagccaagtgactcgacgtttatccacttctgttcatttgatcgtttcagtaatatgcttacaaataaagacatacttgctttaaaacaaaaaaaaaaaaaaaa

SEQ ID NO: 25 - DNA, 559 bp, Homo sapiens
  misc_feature (134): n equals a,t,g, or c
  misc_feature (140): n equals a,t,g, or c
  misc_feature (476): n equals a,t,g, or c
  misc_feature (527): n equals a,t,g, or c
  misc_feature (540): n equals a,t,g, or c
  misc_feature (550): n equals a,t,g, or c
cggcagtgggattactcagtgttgagagaaacaacacggaaagcccagagcagaggagggagaaggccccattctctcagctttaatctactgcacctcggagggcagagctctaaccagacacgctgcaagcntcagantcgggatgaacatcgaggtggggaacatttcttatacaggagccatcatctcctggtcgtcctcggagccctgcctggaggactattaccatattatgtacaggcccaactggaacagcatcttctctggctatcttcgctacagcttccaccacgaggagaaggtgcctcgaacgatcagctccgtggtgctggaacatcttgccccttccactctctacttcctgtgcatcagctgtaagaaggctgccttcccttacaggcactactgcaccatgttccacaccctggataagagtccgctggctcctggaagctccctgggtagacccccanatctctctttgggtgctgatggccattctgctgggcctgcttcacaagccncttgggcttcatnttgcttcaanattttgggg

SEQ ID NO: 26 - DNA, 483 bp, Homo sapiens
  misc_feature (399): n equals a,t,g, or c
ggcacgagcctgcttgaagcctaactgtccaccagaaaggactgctctttgggtgagttgaacttcttccattatagaaagaattgaaggctgagaaactcagcykctatcatgtggaacagctctgacgccaacttctcctgctaccatgagtctgtgctgggctatcgttatgttgcagttagctggggggtggtggtggctgtgacaggcaccgtgggcaatgtgctcaccctactggccttggccatccagcccaagctccgtacccgattcaacctgctcatagccaacctcacactggctgatctcctctactgcacgctccttcagcccttctctgtggacacctacctccacctgcamtggcgcacggtgccaccttctgcagggtatttnggctcctcctttttgcctccaattctgtctccatcctgaccctctgctcatcgcactgggacgctaactcctcattgcccaacc

SEQ ID NO: 27 - DNA, 606 bp, Homo sapiens
  misc_feature (64): n equals a,t,g, or c
tgccaatcttgtaaatagtggttttttgtttcgtttttgccctcttgatctaaaattgcttttnttttcagatggtggccagcagagatctgcaaccccaggtctgtgccactgaacatccagggccttaaacatgacttgggggacttccctgtattcttctttggttctcatgactactactgggtacaccagggcagagtgttcccttatgttgaaggagacaaaagctttgctgaagggcagactagtattaacaagaccttcaaaaaggcactggaagaagctgcaaaacgtttccaggaattgaaagcacaaagagaaagtaaagaagccctagagattgaaaaaaactcaagaaaaccccctccctacaaacacatcaaagctaacaaagtaataggaaaggtgcagatccaggttgctgacctgtcagagattccccgctgtaactgcaagccagctgatgaaaacccttgtggcttggaatcggagtgcctgaacagaatgttgcagtatgaatgccacccgcagtgtgcccagctggagatcgttgtcagaaccagtgctttacaaagagrctataccctgatgcagaggtcatca

SEQ ID NO: 28 - DNA, 902 bp, Homo sapiens
ggacggggatcctgatgctctcaccccaccctccgctgcctctgcttctgccaaggtggccgacactgggccccctaccgaccgtggcgtccaggtgactgagcacggggccacagctgctcttgtccagtggccggatcagcggcctatcccgggcatccgcatgtaccagatccagtaccaacagctcggctgatgacatcctcgtctacaggatgatcccggcggagagccgctcgttcctgctgacggacctggcgtcaggccggacctacgatctgtgcgtgctcgccgtgtatgaggacagcgccacggggctcacggccacgcggcctgtgggctgcgcccgcttctccaccgaacctgcgctgcggccatgcggggcgccgcacgctcccttcctgggcggcacgatgatcatcgcgctgggcggcgtcatcgtagcctcggtactggtcttcatcttcgtgctgctaatgcgctacaaggtgcacggcggccagccccccggcaaggccaagattcccgcgcctgttagcagcgtttgctcccagaccaacggcgccctgggccccacgcccacgcccgccccgcccgccccggagcccgcggcgctcagggcccacaccgtggtccagctggactgcgagccctgggggcccggccacgaacctgtgggaccctagccaggcgcccccccctctaagggtcctctggccccacggacagcaggacccggacaccctgtgggacctggcctcaaactcaccaaatcgctcatggtttttaaaactctgatggggagggtgtcggggacaccggggcaaaacaagaaagtcctatttttccaarmttgggcgaaacaaaaaaaaaaaaaaaaaaaaaaaaaaaaaaaaaaaaaa

SEQ ID NO: 29 - DNA, 1269 bp, Homo sapiens
  misc_feature (1231): n equals a,t,g, or c
  misc_feature (1263): n equals a,t,g, or c
gcatgaacgaaatgtggatccttcacctgtgggtgagtctaagcaccgcccaggtcagtcttcagctcctgctcctccacctcgtcttaacccctccgcctcctcgccaaacttttttaagtacctaaaacataattccagtggagaacaaagtgggaatgctgtgccaaagagcatctcctaccgtaatgccctgcggaaaaaacttcattcttcttcctctgtgccaaattttctaaaatttctggctcctgtagatgaaaataacacctctgattttatgaacacaaaaagggactttgaatccaaagcaaaccatcttggtgattctggtgggactcctgtgaagacccggaggcattcctggaggcagcagatattcctccgagtagccaccccgcagaaggcgtgcgattcttccagcagatatgaagattattcagagctgggagagcttcccccacgatctcctttagaaccagtttgtgaagatgggccctttggccccccaccagaggaaaagaaaaggacatctcgtgagctccgagagctgtggcaaaaggctattcttcaacagatactgctgcttagaatggagaaggaaaatcagaagctccaagcctctgaaaatgatttgctgaacaagcgcctgaagctcgattatgaagaaattactccctgtcttaaagaagtaactacagtgtgggaaaagatgcttagcactccaggaagatcaaaaattaagtttgacatggaaaaaatgcactcggctgttgggcaaggtgtgccacgtcatcaccgaggtgaaatctggaaatttctagctgagcaattccaccttaaacaccagtttcccagcaaacagcagccaaaggatgtgccatacaaagaactcttaaagcagctgacttcccagcagcatgcgattcttattgaccttgggcgaacctttcctacacacccatacttctctgcccagcttggagcaggacagctatcgctttacaacattttgaaggcctactcacttctagaccaggaagtgggatattgccaaggtctcagctttgtagcaggcattttgcttcttcatatgagtgaggaagaggcgtttaaaatgctcaagtttctgatgtttgacatggggctgcggaaacagtatcggccagactgattattttacagatccagatgtwccagctytcgargttgcttcatgattaccacaganactctaccatcacctggaagaacacgaaatcnggccca

SEQ ID NO: 30 - DNA, 338 bp, Homo sapiens
  misc_feature (255): n equals a,t,g, or c
  misc_feature (284): n equals a,t,g, or c
  misc_feature (303): n equals a,t,g, or c
gtttgaagctatggcattcccccactatgagcccacctgtcagccaggctatctgccttgatcctagatgaagtggccattctgcctgcccctcagaacctctctgtactctcaaccaacatgaagcatctcttgatgtggagcccagtgatcgcgcctggagaaacagtgtactattctgtcgaataccaggggtgagttttttcttttaatagttcttctcccttaagcagaattggttcctggaaggcatancccttcctcctgagcccaaggtggctttntgagtccaggggatagatnatccccaaagatctaccccctctgtctgcatgggc

SEQ ID NO: 31 - DNA, 1422 bp, Homo sapiens
cgcgtttgcagaggaagtggcaaagactgattgatattatgatccagcttctaaagattttgctgcttaatctgaagcacattggatttctggttcaataggctttctttttttgtttttattattacaactaatatgtattcttttcacagggcgaacctttcctacacacccatacttctctgcccagcttggagcaggacagctatcgctttacaacattttgaaggcctactcacttctagaccaggaagtgggatattgccaaggtctcagctttgtagcaggcattttgcttcttcatatgagtgaggaagaggcgtttaaaatgctcaagtttctgatgtttgacatggggctgcggaaacagtatcggccagacatgattattttacagatccagatgtaccagctctcgaggttgcttcatgattaccacagagacctctacaatcacctggaggagcacgagatcggccccagcctctacgctgccccctggttcctcaccatgtttgcctcacagttcccgctgggattcgtagccagagtctttgatatgatttttcttcagggaacagaggtcatatttaaagtggctttaagtctgttgggaagccataagcccttgattctgcagcatgaaaacctagaaaccatagttgactttataaaaagcacgctacccaaccttggcttggtacagatggaaaagaccatcaatcaggtatttgaaatggacatcgctaaacagttacaagcttatgaagttgagtaccacgtccttcaagaagaacttatcgattcctctcctctcagtgacaaccaaagaatggataaattagagaaaaccaacagcagcttacgcaaacagaaccttgacctccttgaacagttgcaggtggcaaatggtaggatccaaagccttgaggccaccattgagaagctcctgagcagtgagagcaagctgaagcaggccatgcttaccttagaactggagcggtcggccctgctgcagacggtggaggagctgcggcggcggagcgcagagcccagcgaccgggagcctgagtgcacgcagcccgagcccacgggcgactgacagctctgcaggagagattgcaacaccatcccacactgtccaggccttaactgagagggacagaagacgctggaaggagagaaggaagcgggaagtgtgcttctcagggaggaaaccggcttgccagcaagtagattcttacgaactccaacttgcaattcagggggcatgtcccagtgttttttttgttgtttttagatactaaatcgtcccttctccagtcctgattactgtacacagtagctttagatggcgtggacgtgaataaatgcaacttatgttttcttgttggtaaaaaaaaaaaaaaaaaaaaaaaaaaa

SEQ ID NO: 32 - DNA, 600 bp, Homo sapiens
aattcggcacgagtgactcatcctcctggaaagaaatttcaagggataaagcaccatggatctaacttatattcccgaagacctatccagttgtccaaaatttgtaaataaatcctgtcctcccaccaaccgctcttttcatgtccaggtgataatgtattcggttatgactggagccatgattatcactattcggaaacttggttataatggtttccatatcgcatttcaaacagcttcactctcccacaaactttctgatcctctccatggcaaccacggactttctgctgggttttgtcattatgccatacagcataatgcgatcagtggagagttgctggtactttggggatggcttttgtaaattccacacaagctttgacatgatgctcagactgacctccattttccacctctgttccattgctattgaccgattttatgccgtgtgttaccctttacattacacaaccaaaatgacgaactccaccataaagcaactgctggcattttgctggtcagttcctgctcttttttcttttggtttaggtgttttttcactgccccctttgtgttttcaggcacatggctgatgac

SEQ ID NO: 33 - DNA, 3172 bp, Homo sapiens
ggcacgaggcggctgtgagtctgcggctcggcgacttggtgtgggggaaactcggccgatatcctccttggccaggaaagattgttaatccaccaaaggacttgaagaaacctcgcggaaagaaatgcttctttgtgaaattttttggaacagaagatcatgcctggatcaaagtggaacagctgaagccatatcatgctcataaagaggaaatgataaaaattaacaagggtaaacgattccagcaagcggtagatgctgtcgaagagttcctcaggagagccaaagggaaagaccagacgtcatcccacaattcttctgatgacaagaatcgacgtaattccagtgaggagagaagtaggccaaactcaggtgatgagaagcgcaaacttagcctgtctgaagggaaggtgaagaagaacatgggagaaggaaagaagagggtgtcttcaggctcttcagagagaggctccaaatcccctctgaaaagagcccaagagcaaagtccccggaagcggggtcggcccccaaaggatgagaaggatctcaccatcccggagtctagtaccgtgaaggggatgatggccggaccgatggccgcgtttaaatggcagccaaccgcaagcgagcctgttaaagatgcagatcctcatttccatcatttcctgctaagccaaacagagaagccagctgtctgttaccaggcaatcacgaagaagttgaaaatatgtgaagacctccttcttcctaggtgaagtgggcaatgcagccaagatgatgctgatcgtgaacatggtccaagggagcttcatggccactattgccgaggggctgaccctggcccaggtgacaggccagtcccagcagacactcttggacatcctcaatcagggacagttggccagcatcttcctggaccagaagtgccaaaatatcctgcaaggaaactttaagcctgatttctacctgaaatacattcagaaggatctccgcttagccattgcgctgggtgatgcggtcaaccatccgactcccatggcagctgcagcaaatgaggtgtacaaaagagccaaggcgctggaccagtctgacaacgatatgtccgccgtgtaccgagcctacatacactaagctgtcgacaccccgccctcacccctccaatcccccctctgaccccctcttcctcacatggggtcgggggcctgggagttcattctggaccagcccacctatctccatttccttttatacagactttgagacttgccatcagcacagcacacagcagcacccttcccctgaggccggtggggaggggacaagtgtcagcaggattggcgtgtgggaaagctcttgagctgggcactggccccccggacgaggtggctgtgtgttcacacacacacacacacacacacacacacacacacacacaggctctcgccccaggatagaagctgcccagaaactgctgcctggctttttttcttccgagcttgtcttatctcaaaccccttccagtcaaggaactagaatcagcaacgagagttggaagccttcccacagcttcccccagagcgaagaggctgtagtcatgtccccatcccccactggattccctacaaggagaggccttgggcccagatgagccagtacagactccagacagaggggcccttggggccctccaacctcaggtgatgagctgagaaagatgttcacgtctaagcgtccagtgtgcacccagcgctccatagacgcctttgtgaactgaaaagagactggcagagtcccgagaagatggggccctggctttccagggagtgcagcaagcagccggcctgcaggtgagcatggaggcccggccctcaccgcctcgaagccatgccccagatgccactgccacagcgggcgctcgctcctccctaggctgttttagtatttggatttgcattccatcccttgggagggagtcctcagggccactagtgatgagccaagaggagtgggggttgggggcgctcctttctgtttccgttaggccacagactcttcacctggctctgacttacctcggtcccctcccagtggtcccaccttctccaccctgccctgccaagtcccctgcatgcccaccgctctccatcctccctcctctccctcttcctcccgtggagacagtatttctttctgtctgtccctttggcccagacccagcctgaccaacgatgagcatttcttaggctcagctcttgatacggaaacgagtgtcttcactccagccagcatcatggtcttcggtgcttcccgggcccggggtctgtcgggagggaagagaactgggcctgacctacctgaactgactggccctccgaggtgggtctgggacatcctagaggccctacatttgtccttggataggggaccggggggggcttggaatgttgcaaaaaaaaaagttacccaagggatgtcagttttttatccctctgcatgggttggattttccaaaatcataatttgcagaaggaaggccagcatttacgatgcaatatgtaattatatatagggtggccacactagggcggggtccttcccccctcacagctttggcccctttcagagattagaaactgggttagaggattgcagaagacgagtggggggagggcagggaagatgcctgtcgggtttttagcacagttcatttcactgggattttgaagcatttctgtctgaacacaaagcctgttctagtcctggcggaacacactgggggtgggggcgggggaagatgcggtaatgaaaccggttagtcaattttgtcttaatattgttgacaattctgtaaagttcctttttatgaatatttctgtttaagctatttcacctttcttttgaaatccttcccttttaaggagaaaatgtgacacttgtgaaaaagcttgtaagaaagcccctcccttttttctttaaacctttaaatgacaaatctaggtaattaaggttgtgaatttttatttttgctttgtttttaatgaacatttgtctttcagaataggattgtgtgataatgtttaaatggcaaaaacaaaacatgattttgtgcaattaacaaagctactgcaagaaaaataaaacacttcttggtaacaaaaaaaaaaaaaaaaaa

SEQ ID NO: 34 - DNA, 1319 bp, Homo sapiens
  misc_feature (1136): n equals a,t,g, or c
cccggtgaacacggcacgaggcagtgctgatggcagagattggtgaggatttggataaatctgatgtgtcctcattaattttcctcatgaaggattacatgggccgaggcaagataagcaaggagaagagtttcttggaccttgtggttgagttggagaaactaaatctggttgccccagatcaactggatttattagaaaaatgcctaaagaacatccacagaatagacctgaagacaaaaatccagaagtacaagcagtctgttcaaggagcagggacaagttacaggaatgttytccaagcagcaatccaaaagagtctcaaggatccttcaaataacttcaggctccataatgggagaagtaaagaacaaagacttaaggaacagcttggcgctcaacaagaaccagtgaagaaatccattcaggaatcagaagcttttttgcctcagagcatacctgaagagagatacaagatgaagagcaagcccctaggaatctgcctgataatcgattgcattggcaatgagacagagcttcttcgagacaccttcacttccctgggctatgaagtccagaaattcttgcatctcagtatgcatggtatatcccagattcttggccaatttgcctgtatgcccgagcaccgagactacgacagctttgtgtgtgtcctggtgagccgaggaggctcccagagtgtgtatggtgtggatcagactcactcagggctccccctgcatcacatcaggaggatgttcatgggagattcatgcccttatctagcagggaagccaaagatgttttttattcagaactatgtggtgtcagagggccagctggaggacagcagcctcttggaggtggatgggccagcgatgaagaatgtggaattcaaggctcagaagcgagggctgtgcacagttcaccgagaagctgacttcttctggagcctgtgtactgcggacatgtccctgctggagcagtctcacagctcaccgtccctgtacctgcagtgcctctcccagaaactgagacaagaaagaaaacgcccactcctggatcttcacattgaactcaatggctacatgtatgattggaacagcagagtttctgccaaggagaaatattatgtntggctgcagcacactytgagaaagaaacttatcctytcctacacataagaaaccaaaaggctgggcgtagtggctwcacacctgtggtacccagcactttgggaggaccaaggagggcagatacacttacaggtcaggagttcgagaccagacctggaccaacatggtaaacgctgtaccgtt

SEQ ID NO: 35 - DNA, 1543 bp, Homo sapiens
  misc_feature (1374): n equals a,t,g, or c
  misc_feature (1524): n equals a,t,g, or c
  misc_feature (1541): n equals a,t,g, or c
gccctccctgccagccattcacaagagacctcttgatacaaacaatagaaaattgtggctttcagtaccaagagtttctattatctccaacctctcttggcattccaaattcaaggctacgatattttcttattgcaaagcttcagtcagagccattaccctttcaagcccctggtcaggtactgatggagttccccaaaattgaatctgtacatccacaaaaatatgcaatggatgtagaaaataaaattcaagaaaagaacgttgaaccaaatattagctttgatggcagcatacagtgttytggaaaagatgccattctttttaagcttgaaactgcagaagaaattcacaggaaaaatcamcaagatagtgatctctctgtgaaaatgctaaaagattttcttgaagatgacactgacgtgaaccagtatcttttaccaccaaagtcattgctgcgatatgctcttctgttagacattgttcagcccacttgtagaaggtccgtgtgctttaccaaaggatatggaagctacatagaagggacagggtctgtgttacagactgcagaggatgtgcaggttgagaatatctacaaatcccttaccaatttgtcacaagaagaacagataacaaagctgttaatacttaaactgcgatatttcactcctaaagaaatagcaaatctccttggatttcctccagagttcggatttcctgagaagataacagtgaaacagcgttatcgcctacttggaaatagtctcaacgtgcatgtagtagctaaactaatcaaaatcttatatgaataattttgaaataactctgaaagatggtcatatgatattccttcattttcagagagtaattctgaaattctgttttgaactaattctggtgaaatttaactaaattattttaatctgtccttattaagaaatttggattttattaaaaaaatccatgtgtttcatcaaatttatattactgtattttataaaatacgaactattgttatgctttatggagagtatattttcatatgaaactgataaatatatatgtggaatattctttttaaaaacaattttataaacaaatcaaggagcactagrgctttagtgtctacatgagtatcttgtgaagtgtcataacaggcataacatatttttatgttaattaaagaagttttttatttctaattttaaaataatgattctaattctagcccattgaatgttttacttaatttccaatcctgtaaatatttctttatttcatctaaacaaatgcatatgatatgtaaaccaaattatcatcattcagtttatacagcagactgaagaatatgtcaggaaaaataatcctaaatgnttgattacctctccatgaagcggccacagaaactgttggtgcacattatctacattttcctcagcctctatctgaaggacaaaactcatttttccttcttcattttgtatgtactttcctttagttgactattatcaaagcttggtttgncttctcaacttctgagntg

SEQ ID NO: 36 - DNA, 1269 bp, Homo sapiens
ggcacgaggacccaccctgtaggcggggtgccgactggcggactctggcccagaaactccacctggacagccatctcagcttctttgcctccaagcccagccccacagccatgatcctcaacctgtgggaggcgcggcacttccccaacggcaacctcagccagctggctgcagcagtggctggactgggccagccagacgctggcctcttcacagtgtcggaggctgagtgctgaggccggccaggcccgacacctacactctcaccagctttggcacccaccaaggacaggcagaagccggacaggggcccttccccacaccggggagagctgctcggacaggccccctcccggccgaagctgtcccttaatgctggtccttcagaccctgcccgaactcccacctctccatggcctgcctagccaggctggcactgccactcacactcggccccagggcccaggagggacagtgcctggagcctgggccaggcccagcccatctgtgtgtgtgtatgtgcgtgtgatgctacctctcctcccgtccctctccaggggccccgcatacacacggccatgcacgcacacactgggcctgggccagggccccagagctcctgcctgagctggaccttatgcaaacatttctgtgcctgctgggtaggggcacgtctgaggggccctgctccaagcctgcaggaccgagggccacagccggacagggggtagcccctggattcaggcacacgaccaccacacgagcacgtgccacgcatgcctcgtgtgctcatctcacacacacccccctcccgggtcacgcagacaccccccaaccacacacatctcatgctgtacacctgaggctgctcacgtctcacgcccagtgttggtgcacatttgcctctcacatgctgccctctccacccacccagggacaccccacggctcctccctgcccctgcccctcccccagccttgaggtgccctgcccggcggggcctgtgaatatgcaatgggagtcccaggctgtacagtggtgagtgtgtgtgtggcgtggcgtgcccgtccccagggctggctggtgccccacgcggggcctgtcatgtgaagctcgtgtcctgactttgtcttaagtgcattcacgcacttactcttggccttatgtacacagccttgcccggccgccggggcacataggggttttatcgggcgtgaatgtaaactcgtgccgaattcgatatcaagcttatcgataccgtcgacccga

SEQ ID NO: 37 - DNA, 1401 bp, Homo sapiens
ttctggcggccgcaatccttgtgggacaaggcgttaaatcctggatcaaagacaaagtccaggaaccacgaccttttgttatctggctggaaaaaacacatcatattccggttgatgagttctacactttaaagcgagcagaacgcggaaatctagtgaaagaacagttggctgaagagaaaaatatcccacaatatttgcgttcacactggcagaaagagacggggtttgcctttccttccggtcacacgatgtttgctgccagttgggcactgctggccgttggtttgctgtggccgcgtcggcgaacgttaaccattgctatcttgctggtctgggcaacgggagtcatgggaagccgcctgctgctcgggatgcattggccacgcgatctggtagtagctacgttgatttcgtgggcgctggtggcggtggcaacgtggcttgcgcaacgaatttgtgggccattaacaccacctgcggaagaaaatcgcgaaatagcgcaacgagaacaagaaagttaacgctggttgattttccgaatttagcccttaaatcatcaacaatgcgtgtggatgccatttcgcagacggcgcgaaaatggtactttaaagggctattgcggtaagttgaccataatttattcgctctaaccacataacgggaagtaatgtgaaatatttactcattttcttactggtgttagcgatcttcgtgatttcggtcacgttgggtgcgcagaacgatcaacaggtgacgtttaattatctgttagcgcaaggggagtaccgtatttccacattgctggcggtattgtttgctgcggggtttgctatcggttggttgatttgtggcctgttctggctgcgagttcgtgtttccctggcgcgcgctgaacgtaaaataaagcgactggaaaaccagctttcacccgcgactgacgtggctgtagtgccgcactcgtcagcggcgaaggaataactttctatgctggagttgttgtttctgcttttgcctgtagccgctgcctatggctggtatatgggccgcagaagtgcgcaacaaaacaagcaagatgaagccaaccgcttgccgcgtgattacgtagcgggggttaacttcctgcttagtaatcaacaggataaagcggtagacctgtttctcgatatgcttaaagaggatacaggcaccgttgaagcccaccttacgctcggaaacctgttccgttcgcgtggcgaagttgatcgcgctattcgcatccatcagaccctaatggaaagcgcctcgctgacctatgaacagcgtctgttggcgattcaacaactggggcgtgattacatggccgccgggttatatgaccgcgttcataactcaggttgagatctgcccagctggcagcga

SEQ ID NO: 38 - DNA, 1659 bp, Homo sapiens
agctcgaaattaaccctcactaaaagggaacaaaagctggagctccaccgcggtggcggccgctctagaactagtggatcccccgggctggcgctggaacgactgttccgtgacgatttgcaggacggcagtcttgaacaattgatgttgttgccgttacccttgcccgccgttgtgctggcgaaggtgatggcgcactggatggtaaccggtctgccgttactcatcctttcgccactggtagcaatgctactgggaatggatgtttatggctggcaagtgatggcgctgacgctgctgctgggaacgcctacgcttggctttctcggtgcaccgggcgtggcgctgacagtgggacttaagcgcggtggtgtgctgctcagcatactggtgttaccgctgactatcccattactcatctttgccaccgccgcgatggacgcggcttctatgcatttgcccgttgacgggtatctggcaattttaggcgcgttgctggcaggcaccgcgacattaagtccttttgcgacggcggcagcgttacgaatcagcattcaataacgctggattactgatttttgtccgagtctggtatcgaaactatgtggaaaacactgcatcaactggcgatcccaccacggctgtatcaaatctgtggctggtttataccgtggctggcaattgccagtgtggtcgtgcttaccgtcggctggatctggggattcggctttgctccggctgattatcagcagggaaatagctaccgcattatctacctgcatgtgcctgcggcgatctggtcaatgggcatttatgcatcaatggcagtggcagcgtttattggccttgtctggcagatgaaaatggccaacctggcggtggcggcgatggcccccattggtgccgtgtttacctttattgccctggttaccggctctgcatggggaaaaccgatgtggggcacctggtgggtatgggatgcacgtctgacttctgaactggtgctgctgtttttgtatgtgggtgtgattgccctgtggcacgccttcgacgaccgccgtctggcgggccgtgcggcaggtatcctggtgctgattggcgtggtgaatctgccgattattcattactccgtggagtggtggaacaccctgcatcagggatcaacgcggatgcagcaaagtatcgatccggcgatgcgttcgccgctgcgctggtcgatttttggcttcctgctcctgtctgccacgctgacgctgatgcggatgcgtaatttgattttgctgatggaaaaacgccgtccgtgggtgagtgaactgatactgaaaagaggccgtaaatgacccctgcatttgcttcctggaatgaatttttcgcaatgggcggttacgccttttttgtctggctggcggtggtgatgaccgttattccgctggtggttttggtcgtgcactcggtgatgcaacatcgcgcaattctgcgtggcgtggcgcaacagcgggcgcgtgaggcgcgtttacgtgtgcgcaacagcaggaggctgcatgaatattcgccgtaaaaaccgcttgtggattgcctgtgccgtgttggcagggctggcgctgactatcggtctggtgctatattggtgcgctcgaatatcgatctcttttatacgcc

SEQ ID NO: 39 - DNA, 1573 bp, Homo sapiens
ccacgcgtccggagaggtctggcctcagttggagcaaccgggagaaggcaaagcaggcattcaaggaactgctgagggacaaggctgtcccctccaatgcctcatgggaacaggccatgaagatggtggtcaccgacccccgttacagtgccttgcctaaactgagtgagaaaaagcaggcattcaatgcctacaaggcgcagcgggagaaggaggagaaggaggaggcccggctaagggccaaagaggccaagcagaccctgcagcatttcctggagcagcatgaacgcatgacctccaccacccgctaccggcgggcagaacagacctttggggagctggaggtctgggctgtggtccctgagagggatcgaaaagaggtttatgatgatgtcctcttcttcctggccaagaaggagaaggaacaggccaagcagctccggcgccgcaatatccaggccctaaagagcatcctggatgggatgagtagtgtcaacttccaaaccacgtggtcccaggcccagcagtacctcatggataaccccagctttgctcaggaccatcagctgcagaacatggacaaggaagatgcactgatctgttttgaggagcacatccgagctttggagagggaagaggaggaggaacgggagcgggcccggcttcgggagcgacgccaacaacgcaagaatcgggaggccttccagaccttcctggacgagctgcatgagacagggcagctgcactctatgtccacctggatggagctatatccagcagtcagcactgatgtccgctttgccaacatgctgggccagccgggctccacccctctggacttattcaagttctatgtggaggagttgaaggcacgattccatgatgaaaagaagatcattaaggacatccttaaggaccggggcttctgcgtggaggtgaacacggcctttgaggacttcgcccacgtcataagctttgacaagagggctgccgcactggacgcaggcaacatcaagctgaccttcaatagtctgctggagaaagcagaggcacgggagagggagcgggagaaggaggaggcacgcaggatgcggcgcagggaagctgcctttcgaagcatgctgaggcaggctgtgcctgctctggagctaggcactgcctgggaagaggtccgtgagcgttttgtgtgtgactcagcctttgagcagatcaccctggagtcggagcggatccggctcttccgggagttcctacaggtgctggagcagactgaatgccagcacctccacaccaaaggccgaaagcatggcaggaaaggcaagaagcaccatcacaagcgttcccactcaccctcaggctctgagtcagaagaagaggagctgcccccaccatctctccggccccccaagcggaggaggcggaacccctcagagtcaggctctgagccctcttcctcacttgattcagttgaaagtgggggtgctgcccttggaggacggggctccccttcctcccatcttcttggagcagatcatggccttcggaaagccaagaaaccaaaaaaaaaaaaaaa

SEQ ID NO: 40 - DNA, 1643 bp, Homo sapiens
ccacgcgtccgcagcttcaagtgaagttaatctgaggtgaagcaaacagaaaattgtggaggttttgttggaatgaatctgaagtctgctgcagtaaaacacagaaggctttaaaatgttttcttgcataaaattcaaaacttttaagtagctgcttatgagaatagggaaggcagaaagctaatgtctgtctcaagatacaggacagctgtttgctcatcaacctcaactgtgtgtgcaactgaggaacatggctcaagaaactaatcacagccaagtgcctatgctttgttccactggctgtggattttatggaaaccctcgtacaaatggcatgtgttcagtatgctataaagaacatcttcaaagacagaatagtagtaatggtagaataagcccacctgcaacctctgtcagtagtctgtctgaatctttaccagttcaatgcacagatggcagtgtgccagaagcccagtcagcattagactctacatcttcatctatgcagcccagccctgtatcaaatcagtcacttttatcagaatctgtagcatcttctcaattggacagtacatctgtggacaaagcagtacctgaaacagaagatgtgcaggcttcagtatcagacacagcacagcagccatctgaagagcaaagcaagtctcttgaaaaaccgaaacaaaaaaagaatcgctgtttcatgtgcaggaagaaagtgggacttactgggtttgaatgccggtgtggaaatgtttactgtggtgtacaccgttactcagatgtacacaattgctcttacaattacaaagccgatgctgctgagaaaatcagaaaagaaaatccagtagttgttggtgaaaagatccaaaagatttgaactcctgctggaatacaaaattcttgagcatctgcaaactaaaaattgacttgaggttttttttttcctagtcattgggaatgtagagcagtgtatcttgcatgtcatcggaagaatagatttttgttttggttttgttttgaaaatgactctgaacatttatttccattgcaatttctgtggctgaggagacttaaactttacaagtattatccttttaagatcattttaattttagttgagtgcagagggcttttataacaaacgtgcagaaattttggagggctgtgatttttccagtattaaacatgcatgcattaatcttgcagtttattttctcattgtgtatgtatatatcgcttttctctgcagcacgatttctcttttgataatgccctttagggcacaactagttatcagtaactgaatgtatcttaatcattatggctgcttctgttttttcattaacaaaggttattcatatgttagcatatagtttctttgcacccactatttatgtctgaatcatttgtcacaagagagtgtgtgctgatgagattgtaagtttgtgtgtttaaacttttttttgagcgagggaagaaaaagctgtatgcatttcattgctgtctacaggtttctttcagattatgttcatgggtttgtgtgtatacaatatgaagaatgatctgaagtaattgtgctgtatttatgtttattcaccagtctttgattaaataaaaaggaaaaccagaaaaaaaaaaaaaaa

SEQ ID NO: 41 - DNA, 501 bp, Homo sapiens
  misc_feature (91): n equals a,t,g, or c
  misc_feature (479): n equals a,t,g, or c
ggcagaggcagtttcttatcccatgtagcaaccactggtgcaggtggcagcctggtgcattggggagtatggggacctcctgctggcaggnaactgcgaggagattgagccccttcaggtggacgaagaggaagtgctggcattgctggaaaaggtgctgcagtcccacatgtccctgccagccactcgaggatatgccctcacagccctcatgaagctcagcactcgcctctgtggggacaacaaccgcatccgccagtkggtgtccatctacgggagctgcttggacgtggagctgcagcagcgggctgtggartatgacacamtcttccggaawtacgaccacatgagggytgccatcctggaaaaaatgcctcttgtggagcgagatggccctcaggttgattgaggaagcaaaggaaagcaaagaagcagcccagctttcagaagcagccccagtgcccacagaagccccaggnctcacagctcctggatctgcta

SEQ ID NO: 42 - DNA, 2002 bp, Homo sapiens
gggtcgacccacgcgtccgcagatcagcttcatgagtggcagtggacagctgagctactgagttctagaaggcaccgggcattggtggggcagagcctcacgtggacccacgtggggaaagaagcagaggctccgtcacggggagttgtcgtgaccttgaacttggcatcatctttgaagaagctgaagggaaagaaggaatgacagagggagtgcctttccatccacatcggtcaagctggcatccagattggggacgcctgctgggaactctattgcctggaacatggaatccagccaaatggcgttgttcttgacactcaacaggatcagctggaaaatgcaaaaatggagcacacaaatgcatctttcgataccttcttctgtgagacaagagctgggaagcatgtgcctagagcactcttcgtggacttggagccaactgttatagatgggatccggacgggccagcaccgttcactcttccaccccgagcagctccttagcggaaaggaggatgctgccaacaattacgcgcgaggccgttactctgtggggtcggaggtcatcgaccttgtgctggagaggacccggaagctggcagaacagtgtggtggacttcagggatttttgattttccgaagctttggaggaggcactggttcagggtttacgtctctcttaatggagaggctcacaggagaatatagcagaaagactaagctggagttctcggtctacccagcccccaggatctccactgccgtggtagagccttataactctgtcctcaccacccactccaccacagagcacacggactgtaccttcatggtggacaacgaggccgtctatgatatatgccatcgtaaactcggtgttgaatgcccctctcatgccagcatcaatagattggtggttcaggtggtatcttccatcactgcctccctccggtttgaagggcccttgaatgtagacctaattgaattccagaccaacctggtaccttatccgagaatacatttccccatgacagccttcgcccccatcgtctctgctgacaaagcctaccatgagcagttctctgtgtcagacatcaccactgcctgctttgagtcctccaaccagctggtcaagtgtgatcctcggcttgggaagtacatggcctgctgcctactctatagaggggatgtggtccccaaggaagtgaatgcagcaatcgcagccacgaagtcgaggcactctgttcagtttgtagattggtgtccaactggtttcaaggtgggcatcaacaatcggccgcccacggtgatgccgggtggggacctggccaaagtccaccggtccatctgcatgctgagcaacaccacggcgattgtggaggcctgggcccgcctggaccacaagtttgacctcatgtacgccaagagagcatttctgcactggtacctcagagaaggcatggaagaagcagagttcttggaggccagggaagatctggcagccctggagagggactatgaggaactggcgcaaagtttctgaggcatgtatgatgggtgcaaatgaatgtcaagttaaaatggcatgttttcttttcaagccgttatatgcctagtgggtagttcccctgataagcagaaaaatgaactcaaatcaggcaagactctaggttccacactaaattaagtgggtcagtaccaacaatgaacacattatttcctggtctactggtacaagtcagctctgctacctgggagcctttggaagcttagagtcctttgaactgctgagtcacttctaggtgggatttttttgttttaccaagagacaatgaaatcctaaagtttatgcttttcctttctggtaccggaagtagaaaacagcacatgttgattacgaatgttttttcccccatgtctacattttttacactgattaaatcataaatattttcagtaaaaaaaaaaaaaaaaaaaaaaaaaaaaaaaaaaaaaaaaaa

SEQ ID NO: 43 - DNA, 304 bp, Homo sapiens
cgcaaatattttgaggagctacaaccaggcgacagcctgttgactccccgccgcacaatgacagaggccgatattgttaactttgcttgcctcagcggcgatcatttctatgcacatatggataagattgctgctgccgaatctattttcggtgagcgggtggtgcatgggtattttgtgctttctgcggctgcgggtctgtttgtcgatgccggtgtcggtccggtcattgctaactacgggctggaaagcttgcgttttatcgaacccgtaaagccaggcgctgatcgtcgtcggcaagaaa

SEQ ID NO: 44 - DNA, 1377 bp, Homo sapiens
gggcggcaatctgcaaaaaaccctgaccgcgcccgtcaccgctatcgtcgcctgggacagtgaattttatgaacggttaccactactgtttccccacggtgatgcccgcagttggtttacctccagcccacaacttgccgaagaaacagcgtttcgcaacagttccatgcaggcggcctatctgatcgtcgcctgccgggcgctgggactggataccggcccgatgtcgggctttgaccgtcaacacgtggacgacgccttttttacgggcagcacgctgaagagcaatctgctgattaatatcggctatggcgatagcagcaagctttatgcgcgcctgccacgtctgtcctttgaagaagcctgcgggctgttgtaaggagcaaactatgaacattgtcgatcaacaaacttttcgcgatgcgatgtcctgcatgggcgcggcggtcaatattatcaccacggacggtccagccgggcgcgccgggttcaccgccagcgccgtctgcagtgtgaccgatacgccgcccacattactggtgtgcctgaatcgtggggcgtccgtctggccggcattcaatgaaaatcgaacgctgtgtgtaaatacacttagcgccgggcaggagccgctttcaaacctttttggcggcaaaacgcccatggaacaccgctttgccgccgcccgctggcagacgggggtgaccggatgcccgcaactggaagaggctctggtttcgtttgactgccgtatcagccaggtggtgagcgtcggcacccacgacattctgttttgcgccatcgaagcgattcatcgtcacaccacaccctacgggctggtgtggttcgatcgcagttatcacgcgcgctacgtaccattccgcatctgtggcaaatttgcgaggacatgacggaagtctgccccgatgccaccatgctcaactatgttaacccaatggcgcaacccgcgtgctggcagccattgacgcgcgaatgggcgaagtttactgggccgaatatcagcgtgatgaaaacggtatctggcacggtgaagaaaccgaatccgtactcaaacccgaaatcgtccatgaacgaatgcaacagctttccggcgaatgggtgacggtagggacgggctggcaagcttggccggatctcggtaaagagagcgtttacgccgcatccgacatcaacgcctgatgcgacgcttgccgcgtcttatcaggcctacgccagacagcgcaatagcctgatttagcgtgattttgtaggtcggataaggcgtttatgccgcatccgacatcaacgcctgatgcgacgcttaacgcgtcttatcaggcctacgccagacagcgcaatagcctgatttagcgtgatttt

SEQ ID NO: 45 - DNA, 790 bp, Homo sapiens
ccacgcgtccgactagttctagatcgcgagcggccgccctttttttttttttttttttttttttttttttggaatatatataacatttattcataagttccaatgtcatttcttacttgattgtcaatgggcaatacacagtctgcatgctcattaagttccttcattgccaagatgctattataaggtgaggttatgacatcatcctcaccagaaggataaatggaagtcacaaatctgtatacttctgggaattcgtcttcaagcacctttaaaagaaatgtgccaagtccagatcctgttcctcctcccatggaatgtattataaagaaacactgcaagcaatcacagtgctctgccgactttctgaatttctctaaaatctggtcttggtaaagactgccgaaaactttgtgacccacggcccaattatttcctgagccagaaatatcagtgatgagctgtttcgtatcaaatacatctctcagtggtccctgcagaatttcattcactaccccttcttccatatcaatcaagactgctcgtgcttttaaagaacatatttttcccttggaaatacttccaccatcaccaaccactctggtgtccacatttctaaagaagctgcttattgcctcatcataaattcctttctggttgaccgcggcgtgctcccttagtgccaggtcccagaagcagcagccgatctggtttccgcactggccgacctgtacgaccaccgactgggtcatggtggtgcgccgccggctccgggagcttgctagcccgc

SEQ ID NO: 46 - DNA, 2132 bp, Homo sapiens
ggcacgagcggccgcgggctagcaagctcccggagccggcggcgcaccaccatgacccagtcggtggtcgtacaggtcggccagtgcggaaaccagatcggctgctgcttctgggacctggcactaagggagcacgccgcggtcaaccagaaaggaatttatgatgaggcaataagcagcttctttagaaatgtggacaccagagtggttggtgatggtggaagtatttccaagggaaaaatatgttctttaaaagcacgagcagtcttgattgatatggaagaaggggtagtgaatgaaattctgcagggaccactgagagatgtatttgatacgaaacagctcatcactgatatttctggctcaggaaataattgggccgtgggtcacaaagttttcggcagtctttaccaagaccagattttagagaaattcagaaagtcggcagagcactgtgattgcttgcagtgtttctttataatacattccatgggaggaggaacaggatctggacttggcacatttcttttaaaggtgcttgaagacgaattcccagaagtatacagatttgtgacttccatttatccttctggtgaggatgatgtcataacctcaccttataatagcatcttggcaatgaaggaacttaatgagcatgcagactgtgtattgcccattgacaatcaatctttatttgacatcattagcaaaatcgacctcatggtgaattctggaaagttgggtacaactgtgaagccaaagagtctggttacttcaagttctggggctttaaaaaagcagcataagaagccctttgatgcaatgaataacattgtggcaaatttgctcctcaacctaacgagctctgcaagattgaagggtcccttaatatggaccttaatgaaatcagcatgaatttagttccttttcctcaacttcattatctcgtgtcaagcctaacacctctgtatacactgacagatgttaacattcctcctagaagattggatcagatgttttcagatgcctttagtaaagatcaccagctgcttcgggcagaccccaaacacagtctttacctcgcctgtgcactcatggttagaggaaatgtacaaatttcagatcttcgtagaaatattgaaagattaaaaccatctctacaatttgtctcctggaatcaagaaggctggaagaccagcctgtgttccgtacctcctgtgggccattctcattcgttattagctttagcaaataacacatgtgtgaagcccaccttcatggaactgaaagagagattcatgaggctctacaagaaaaaggctcaccttcatcactatctacaagttgaagggatggaagaaagctgtttcacagaagctgtgtcatctttatcagcactcatacaggaatatgaccaactggacgccacaaaaaacatgcctgtgcaggatttacccagactaagcatagctatgtgaaaaagaaaccctcaaaaatactttcttaatttcacattgttttttctgacctttctgtttcaacatttttgtaatttggaaactccagttttttcatattatcgggaaatatttttgtctaaaagagtgatttctgtttaatcgcaatttgttggtaataccaatgtgtgaaattagtgaaatcttagtaccttaacttcaaacatttctcttcagaaaagttcccttttctaaaattgagataacatagttcttgaatattttgctgtatttatagcctcatatttaggcatttatgcactgatgtgtcttcaataaaaatcttgtacagatatatttttataattatttataatttatattttgatattctatttaagttatcctgattctttaaaagtagttattgggagtagaagaacacaatataaatatttccgtgtaatagccaccaacttttcaggcataggttttattacaactgttaaggaggttttgcttcttctttagataacaacttgtttgcccaaaagaatcctaatttgtacacttaacatgtatttgtattaaactttttaaataattgctttcttatcaaaccaattgattttataataaatgtctatatttttcaaaaaaaaaaaaaaaaaaaaa

SEQ ID NO: 47 - DNA, 862 bp, Homo sapiens
  misc_feature (138): n equals a,t,g, or c
  misc_feature (649): n equals a,t,g, or c
  misc_feature (704): n equals a,t,g, or c
  misc_feature (855): n equals a,t,g, or c
tcgacccacgcgtccgcccacgcgtccggtaattcctgaaacatctgtatccagtactgtttccagcacacaaactatggtaacccagcagaccattaaaactgaatcatccagtacaaatggggcagttgttaaagntgaaacttcactaacaacattcagtaccaaatctgaagttgatgaaacatatgcactgcctgcaacgaagatcagccgtgtagagacacatgctacagcaacgccgttttctaaataaataactgaagtgcacatttgttttgagcttctggaaacagtgtctcatttataagaagatggctttaaaagraagagactccttcaaatccagtggccacagtgaaagcgggagaacgacaatggtgtgatgtgggaatttttaaaaataatacagctttggtgagccagttttatttgctgccaaaagggaagcaaagcatctcaaaggtaggaaatgcagatgtacctgactacagcttgcttaagaaacaagatcttgttccaggcacaggatacagattcagggttgctgcaatcaatggttgtgggataggtcctttcagcaaaatcagtgaatttaaaacttgtattcctggttttcctggagctccttctgcagtcagaatttcanagaatgttgaaggtatccacctttcctgggaacctccaacctcaccttctggaanatattttggaatattcagcctacttggctatccgcacagcacagatacaagataatccaagtcaacttgtgttcatgaggatttattgtggtcttaagacatcatggatagtaactgctgggcaactggcaaatgcacatattggattatncatccat

SEQ ID NO: 48 - DNA, 367 bp, Homo sapiens
  misc_feature (254): n equals a,t,g, or c
  misc_feature (272): n equals a,t,g, or c
  misc_feature (327): n equals a,t,g, or c
aattcggcacgagggactcctcccggggaccagcgacccggggacagcacgtcgtcgcaccgctcttcctccagccgctgagccgtcccttctcgccatgtcccagagcagcaccgcgccgaggccccgccgctggagcgcgaggacagtgggaccttcaggtgaaggtacaagtaagaagctggcgaaacatagagctgcagaggctgccataaacattttgaaagccaatgcaagtatttgctttgcagttnctgaccccttaatgcctnacccttccaagcaccaaaggaccagttaatcctatttgttcattacaggatttgntattcatcatggttgagattcctgaatatacctttccagg

SEQ ID NO: 49 - DNA, 2316 bp, Homo sapiens
gggtcgacccacgcgtccggcggcggcggcggcgccacctccgcctgctgctccgacccgctcccggcccgcggcggcggcaccagggcgcccggctcagccttcccggaggcctcggcccggcctcatcgtgccggcttcgcgcgcgaacccggctttcgcatttgggaccctgcagggccctgaaaaggagcctttaaaagtcaattctactccatttggcaaagagggaactgaaatctggaaagtaaggacttgcccaaggtcactgacttagtggcagactagagacttgaactcaggtctccattcccagcagaaaaatatggctcaggagactaaccagaccccggggcccatgctgtgtagcacaggatgtggcttttatggaaatcctaggacaaatggaatgtgttcagtttgctacaaagaacatcttcagaggcagcaaaataatgacagaaatgagcatttcaagagaggacaaaataactaccccgaaaacagaggtgtcagagccagttgtcactcagcccagtccatcagtttctcagcccagtacttctcagagtgaagaaaaagctcctgaattgcccaaaccaaagaaaaacagatgtttcatgtgcagaaagaaagttggtcttacagggtttgactgccgatgtggaaatttgttttgtggacttcaccgttactctgacaagcacaactgtccgtatgattacaaagcagaagctgcagcaaaaatcagaaaagagaatccagttgttgtggctgaaaaaattcagagaatataaattacttcttgtgaagagactgaaactttgtttttattttaatatatcgtaggaaaacattaaagagcagatgcatggccatttttctttgatgttctccagagttttacattacacttgtctgtcttataattgatattttaggatgtttgggtgtttgttacaggcagaattggatagatacagccctacaaatgtatatgccctcccctgaaaaaaattggatgaaaatctgcacagcaaagtgaaacacacagataataggaacaaaatgtagttcccatgtgccaaacaaaataaatgaaatctctgcatgtttgcagcatatctgccttttgggaatgtaatcaaggtataatctttggctagtgttatgtgcctgtatttttttaaaatggtacaccagaaaaggactggcagtctacttctaccatagttaaacttcaccctctttaatttcacaacatattctttggaagcaggaagaaatgctcataaagaggatcagaccttctttcccgtgaaaccagtatttggcgccatatataagcctggttaaattggtcatctaaagctgtcaaataagacattctgtgaaaggtaaacatcgaaactggttataagtaaaaccatcaagccaacaacagggtcttgagataacctttgaagcttattgtactggcctgcaccagaagatgtctgcattactcattgctaaaaatgtgtagcacagaactgcactaggattaatttgtttacaagaagaaatttaaactctacgtttggttttcacatacagcagctctattgaataacatgcatctgaattttaagttgcaaaggtatctgaataatttttcatgtgcatcttttgtcgaatgttttggttcaagaaagaatgtttaaagctttttaaaagacttcagttcttaatgtaactgtacccttctgcatggaaaatcataaccaacatggctgcagtagacttcttagtggtatccagcaccacttgcagagggctgctttatcatattgtacttgggtgtaggactctagtgttcttgggtgtattgcatgggctgcattatctacagcattgtacaataacaactagaaaaggcagtatacttcactgatgcttgtctggtaataatcacttctgtgttataatggaaggttttttgtgatgtatgaaacttgtgttttttatatataaatgagtatagttagtgttgtggtaatgcctgttttcatctgtaaatagttaagtatgtacacgaggcactacttctgatttattgcaatgttcagtcctagtttttacttttattcttaaagcattcagttttgctttcaattttatgtaccttagttctgagttagacctgcagatgtgtacagatagttcatatttatgtattgcacataatcatgctattcagcattgatgctatattgtattatgtaaataataaaagccatgtacagagggaaaaaaaaaaaaaaaaaaaaaaaaaaa

SEQ ID NO: 50 - DNA, 2823 bp, Homo sapiens
gtacatcctggtcagacagtgacctgttctccagggaccagaagagtctgctgccccctcctaaccagtcccaactgctggaggaattcctggataactttaaaaagaatacagccaatgatttcagcaacgtccctgatatcacaacaggtctgaaaaggagtcagacagatggcactctggatcaggtttcccacagggagaaaatggagcagacattcaggagtgctgagcagatcactgcactgtgcaggagttttaacgacagtcaggccaacggcatggaaggaccgcgggagaatcaggatcctcctccgaggcctctggcccgccacctgtctgatgcagaccgcctccgcaaagtcatccaggagcttgtggacacagagaagtcctacgtgaaggatttgagctgcctctttgaattatacttggagccacttcagaatgagacctttcttacccaagatgagatggagtcactttttggaagtttgccagagatgcttgagtttcagaaggtgtttctggagaccctggaggatgggatttcagcatcatctgactttaacaccctagaaaccccctcacagtttagaaaattactgttttcccttggaggctctttcctttattacgcggaccactttaaactgtacagtggattctgtgctaaccatatcaaagtacagaaggttctggagcgagctaaaactgacaaagccttcaaggcttttctggacgcccggaaccccaccaagcagcattcctccacgctggagtcctacctcatcaagccggttcagagagtgctcaagtacccgctgctgctcaaggagctggtgtccctgacggaccaggagagcgaggagcactaccacctgacggaagcactaaaggcaatggagaaagtagcgagccacatcaatgagatgcagaagatctatgaggattatgggaccgtgtttgaccagctagtagctgagcagagcggaacagagaaggaggtaacagaactttcgatgggagagcttctgatgcactctacggtttcctggttgaatccatttctgtctctaggaaaagctagaaaggaccttgagctcacagtatttgtttttaagagagccgtcatactggtttataaagaaaactgcaaactgaaaaagaaattgccctcgaattcccggcctgcacacaactctactgacttggacccatttaaattccgctggttgatccccatctccgcgcttcaagtcagactggggaatccagcagggacagaaaataattccatatgggaactgatccatacgaagtcagaaatagaaggacggccagaaaccatctttcagttgtgttgcagtgacagtgaaagcaaaaccaacattgttaaggtgattcgttctattctgagggagaacttcaggcgtcacataaagtgtgaattaccactggagaaaacgtgtaaggatcgcctggtacctcttaagaaccgagttcctgtttcggccaaattagcttcatccaggtctttaaaagtcctgaagaattcctccagcaacgagtggaccggtgagactggcaagggaaccttgctggactctgacgagggcagcttgagcagcggcacccagagcagcggctgccccacggctgagggcaggcaggactccaagagcacttctcccgggaaatacccacaccccggcttggcagattttgctgacaatctcatcaaagagagtgacatcctgagcgatgaagatgatgaccaccgtcagactgtgaagcagggcagccctactaaagacatcgaaattcagttccagagactgaggatttccgaggacccagacgttcaccccgaggctgagcagcagcctggcccggagtcgggtgagggtcagaaaggaggagagcagcccaaactggtccgggggcacttctgccccattaaacgaaaagccaacagcaccaagagggacagaggaactttgctcaaggcgcagatccgtcaccagtcccttgacagtcagtctgaaaatgccaccatcgacctaaattctgttctagagcgagaattcagtgtccagagtttaacatctgttgtcagtgaggagtgtttttatgaaacagagagccacggaaaatcatagtatgattcaatccagatatgggttaaattcctcattttacttttaaactggtggtaaagtggaaattgcaaaaaaaaaaaaaaaaaaaaactgttcattcctgggttttgtgcagtatacattttcccacaaaatggttgtaaagatttaagttattttaatttattggggatcagaaacctagatgaaactggtcagaatctgtaaattacttagtttatatccactttgagcaggtatcaaatgatttaggatccttaaaattacattctaataattaagttatgtggaaaaagtaaggctggggaagtcgtgattaatagttttcaaagggccatttttttaaatcctctgggcattttctttcagctgtttgttagtttttgctttatttaaagcatatttaagttattttaatgtggtttaggggcaaaatgtgcagatacttcatttttgtaagattgtaatagatgctgttttttcttaacctgtcatatctttttttcccgtttttttttaaaaaaagcttgtgctgtattttaattaatgatatttattttttctgcccacctgtttagttaaaggaaaattagtcccctttggttaaaaaaaaaaaaaaaaaaaaaaaaaaaaaaaaaaaaaaaaaaaaaaaaaaaaaaaa

SEQ ID NO: 51 - DNA, 520 bp, Homo sapiens
  misc_feature (437): n equals a,t,g, or c
  misc_feature (442): n equals a,t,g, or c
  misc_feature (452): n equals a,t,g, or c
  misc_feature (457): n equals a,t,g, or c
ggctttcccgctccccgcgctcctccgcccgggtccgccagccgaggccgctcccgaggtcggaagatgccggccgtgtccaagggggacgggatgcggggcctggcggtcttcatctcggatatccgcaactgtaaaagtaaagaagcagaaataaaaaggataaacaaggaactggcaaatatcagatcaaaatttaaaggtgacaaggctcttgatggctatagtaaaaaaaagtacgtctgcaattgctcttcatctttctccttggtcatgacattgactttggacacatggaggctgtgaacctgctgagttcaaacagatacacggaaaagcagatcggctaccttttcatctctgtgttggtgaactcaaacagtgagctgatccgcctgatcaacaacgccatcaagaatgacctggccagccgcaancccancttcatgggnctggncctgcactgcatcgccagcgttggcagccgggagattgcgaagcttcgccggggagatcctaa

SEQ ID NO: 52 - DNA, 533 bp, Homo sapiens
  misc_feature (5): n equals a,t,g, or c
  misc_feature (6): n equals a,t,g, or c
  misc_feature (8): n equals a,t,g, or c
  misc_feature (22): n equals a,t,g, or c
  misc_feature (491): n equals a,t,g, or c
gtcanncngccagtcacggtcngaattcccgggtcgacccacgcgtccgggccctggctgagaggcgttaggagtccgggggttcgcccgcggaggccggggagcagccgaccatggagccccagaaaatcatgccaccctcaaagcctcatccacctgtcgtsggcaaagtgactcatcacagcattgaattatactgggatctggaaaagaaagccaaacgccaaggacctcaagagcagtggttcagsttctcgattgaagaagaagaccccaaaatgcacacttatggtatcatttatacgggatatgcaacgaagcatgttgttgaargtctggaaccaaggacgctgtacagatttcgcctgaaggtcaccagcccctctggggagtgtgagtacagcccactcgtctcagtgtctacaaccagagagcccataagtagtgagcacttgcaacgggctgtcagtgtgaatgatgaagatttgctngtccgaatacttcaaaggaggccgtgttaaaggttatgttcc

SEQ ID NO: 53 - DNA, 1413 bp, Homo sapiens
ggcacgagaagaaattccattcaaatttatctacttaacgtagccattgcagacctcctactcatcttctgcctccctttccgaataatgtatcatattaaccaaaacaagtggacactaggtgtgattctgtgcaaggttgtgggaacactgttttatatgaacatgtacattagcattattttgcttggattcatcagtttggatcgctatataaaaattaatcggtctatacagcaacggaaggcaataacaaccaaacaaagtatttatgtctgttgtatagtatggatgcttgctcttggtggattcctaactatgattattttaacacttaagaaaggagggcataattccacaatgtgtttccattacagagataagcataacgcaaaaggagaagccatttttaacttcattcttgtggtaatgttctggctaattttcttactaataatcctttcatatattaagattgggaagaatctattgaggatttctaaaaggaggtcaaaatttcctaattctggtaaatatgccactacagctcgtaactcctttattgtacttatcatttttactatatgttttgttccctatcatgcctttcgattcatctacatttcttcacagctaaatgtatcatcttgctactggaaagaaattgttcacaaaaccaatgagatcatgctggttctctcatctttcaatagttgcttagatccagtcatgtatttcctgatgtccagtaacattcgcaaaataatgtgccaacttctttttagacgatttcaaggtgaaccaagtaggagtgaaagcacttcagaatttaaaccaggatactccctgcatgatacatctgtggcagtgaaaatacagtctagttctaaaagtacttgaggtaaacatactaaaatgaattatataatgcagcctcttaattctttgaagaactaaaaaattaggaaacaaagttctagcatttacaaaactcagatctcaaagctctgcttgtatttgtgatatttcatttgcttaactgtaaaccatttcaaggtactaacttttaaatctgtatgtaaaatcttttcaaaatacatttttaagctaatactcttaacatagattatgaagttaagtgaaatttatggctctaacagcaaaataattaaagtgccatagtttctcaagtgactaaagtagttattaaaatcaagcacttgatactaatttgaagtgtgtttaaaagtaaatgatttgggaactgacaatgtgtcagaaaatatatgttcatttatcattttaaaatcttgtataatttgccactgtattcatttatgcctaaatctctataacagatgaaaagataattaataaaatcctaattaaaaaatgaaaaaaaaaaaaaaaaaa

SEQ ID NO: 54 - DNA, 511 bp, Homo sapiens
  misc_feature (12): n equals a,t,g, or c
  misc_feature (31): n equals a,t,g, or c
  misc_feature (413): n equals a,t,g, or c
  misc_feature (495): n equals a,t,g, or c
  misc_feature (502): n equals a,t,g, or c
  misc_feature (511): n equals a,t,g, or c
aggatcagcggnaatgcccgtcgaaacggtncgtcctgcatgataccacggaacgcattcatgaccgatattgccttcaccgaggctatgatggcggtcaacgcggctgccaaaggtgcttttcgcatcgttaaggtgcatcccgcgcagatacttaaagccgacagtacgggcaaaawccgcgaatgttttctcgcattcgkctggagtacgcaaatcatacccggcagcgaaacatggcaggtatcaatgcagacgccgacgcgggatttatcttccacgccgtcgataatcgccgcgagatgttcgaatttaaaccctaagttactgccctgaccggcggtgttttctatcaccgctgttcacaccttgagttttatccagcgcaatgttgatgggattcggcaatacgngcaaggcaatcctcttctgaaatctgcatcaatggttgccaggtggaagttgagcaagaaagccccattgttcgaaagttgnatttcantttaaaggn

SEQ ID NO: 55 - DNA, 1313 bp, Homo sapiens
  misc_feature (253): n equals a,t,g, or c
actcctgtatcaaccatgagttcttctcagcctgtgtcacgaccattgcaacccatacaaccagcaccgcctcttcaaccatctggggtgccaacaagtggaccatctcagaccaccatacacttactacctacagctccaactaccgtgaatgtaacacatcgtccagtaactcaggtgaccacaagactccctgtaccaagagctcctgcaaaccaccaggtggtttatacaactcttcctgcaccaccangctcaggctcccttgcgaggaactgttatgcaggctcctgctgttcggcaggtcaatccccaaaatagtgttacagttcgagtgcctcaaacaaccacatatgttgtaaacaatggactaaccctgggatcaacaggacctcagctcacagtgcatcaccgaccaccacaagtgcatactgagcccccacgccccgtgcacccagcacccttaccagaagctccacaaccacagcgtctgcccccagaagctgccagcacatctctgcctcagaagccacacttgaagttagcacgcgttcagagtcaaaatggcatagtactgtcatggagtgtcctggaggtggatcgaagctgtgccactgttgatagctaccatctctatgcttaccatgaggaacccagtgccactgtgccctcacaatggaaaaagattggggaagtcaaggcacttcccttgcccatggcatgtactctcacccagtttgtatctggtagcaaatactactttgcagtacgagccaaggatatttatggacgttttgggcctttctgtgatcctcagtcaacagatgtgatctcttctacccagagcagttaaaccttggagcctttatattttcctcttttaaaatttccaccttttggtcttgtttttaatcttgtgcatgataccccatgtaaaatccaccttgtgcaagatttcttggacagatgtgtgtatacactacatttgtttataaccagaagcaaaataaactcagcccacaaagctagaatcttttcctggacagtttaggctttggggtttggaaatgtaaatgtgtaccttgctttagttttgaggctggggaatatgtgtgggtgtttatgtgtgtttttccttatgtaggtgttattgcattggagtctcccattttcattctcaaatttacctcttaaagtacgaagtaagtagatcaaaggatttgagatgtgtaactggcatgattctgcttttgaaggatctatagtatcattttagttaagtgggtcaaacagaatcaaaacaaaacccaaag

SEQ ID NO: 56 - DNA, 593 bp, Homo sapiens
  misc_feature (559): n equals a,t,g, or c
cccagcgtccgtaaatgctggacaagtagtcacaggaaatctggccccacatttccttgccctgtgtaagcccaattatacagcacttggatgtcagcagtatacacaattcatcagtggggaagaggcctgtactggcaacccagatctcatcatgagagcccgaaaaacctttccatccaaagaagcagctctcagtgtctatgcagctatgtatctgaccatgtacatcaccaacacaatcaaagccaagggaaccagacttgctaagccagttctatgcttgggcttaatgtgtttggcatttcttactggactcaacagagtagcagaatatcgaaatcattggtcagatgttatagcaggctttctggttggaatatctatagcagtatttctggttgtgtgcgtggtgaataatttcaaagggagacaagcagaaaatgagcatatacacatggataatctggcacagatgccaatgatcagcattccycgagtagaaagtccyytggraaagaaccccatcactsccttcgcagaagtcacatgatatcgnagcagatggkttttcactgcattggacatcatcc

SEQ ID NO: 57 - DNA, 1694 bp, Homo sapiens
gcccgctgttgcgtgctgccagcgggaactgtgtaggggtagattttcgctgcagtgttccccgagcctgttagacgcagcgcgccgggagactgagagaggaaaggatagaggaagtgctgccctaggctgcatgagtcgaagcaagcgtgtttccttcccgccaggcaagtgcccttagaaaccgggccccgcccccttcctggcctgcattcccatcccctctcccggggcggaggtgaggacctccttggttcctttggttctgtcagtgagccccttccttggccatgaagctcgtgaggaagaacatcgagaaggacaatgcgggccaggtgaccctggtccccgaggagcctgaggacatgtggcacacttacaacctcgtgcaggtgggcgacagcctgcgcgcctccaccatccgcaaggtacagacagagtcctccacgggcagcgtgggcagcaaccgggtccgcactaccctcactctctgcgtggaggccatcgacttcgactctcaagcctgccagctgcgggttaaggggaccaacatccaagagaatgagtatgtcaagatgggggcttaccacaccatcgagctggagccaaccgccagttcaccctggccaagaagcagtgggatagtgtggtactggagcgcatcgagcaggcctgtgacccagcctggagcgctgatgtggcggytgtggtcatgcaggaaggcctcgcccatatctgcttagtcactcccagcatgaccctcactcgggccaaggtggaggtgaacatccctaggaaaaggaaaggcaattgctctcagcatgaccgggccttggagcggttctatgaacaggtggtccaggctatccagcgccacatacactttgatgttgtaaagtgcatcctggtggccagcccaggatttgtgagggagcagttctgcgactacatgtttcaacaagcagtgaagaccgacaacaaactgctcctggaaaaccggtccaaatttcttcaggtacatgcctcctccggacacaagtactccctgaaagaggccctttgtgaccctactgtggctagccgcctttcagacactaaagctgctggggaagtcaaagccttggatgacttctataaaatgttacagcatgaaccggatcgagctttctatggactcaagcaggtggagaaggccaatgaagccatggcaattgacacattgctcatcagcgatgagctcttcaggcatcaggatgtagccacacggagccggtatgtgaggctggtggacagtgtgaaagagaatgcaggcaccgttaggatattctctagtcttcacgtttctggggaacagctcagccagttgactggggtagctgccattctccgcttccctgttcccgaactttctgaccaagagggtgattccagttctgaagaggattaatgattgaaacttaaaattgagacaatcttgtgtttcctaaactgttacagtacatttctcagcatccttgtgacagaaagctgcaagaakggcactttttgattcatacagggatttcttatgtctttggctacactagatattttgtgattggcaagacatgtatttaaacaataaactaaaaggaaataatctccacgtactaccatcttgattaaattgtgtaattttttataggaaaaaaaaa

SEQ ID NO: 58 - DNA, 1623 bp, Homo sapiens
  misc_feature (14): n equals a,t,g, or c
  misc_feature (51): n equals a,t,g, or c
  misc_feature (70): n equals a,t,g, or c
  misc_feature (437): n equals a,t,g, or c
attcggtacaatgnaaaggaaaggaaggtctgaactaattgtcgtggaagnaaggaagtgaaccctcagnaacttataaaggtcttaggggaaaagccagagcttccagatggaggtgatgatgatgacattatagcagacataagtaacaggaaaatggctaaactatacatggtttcagatgcaagtggctccatgagagtgactgtggtggcagaagaaaaccccttctcaatggcaatgctgctgtctgaagaatgctttattttggaccacggggctgccaaacaaattttcgtatggaaaggtaaagatgctaatccccaagagaggaaggctgcaatgaagacagctgaagratttctacascaaatgaattatyccaagaatwcccaaattcaagttcctyccagaaggrggkkgaacaccawtcttcnaaacagttttttaaggactggagagataaagatcagagtgatggcttcgggaaagtttatgtcacagagaaagtggctcaaataaaacaaattccctttratgcctcaaaattacacagttctccgcagatggcagcccagcacaatatggtggatgatggttctgscaaagtggagatttggcgtgtagaaaacaatggtaggatccaagttgaccaaaactcatatggtgaattctatggtggtgactgctacatcatactctacacctatcccagaggacagattatctacacgtggcaaggagcaaatgccacacgagatgagctgacaacatctgcgttcctgactgttcagttggatcggtcccttggaggacaggctgtgcagatccgagtctcccaaggcaaagagcctgttcacctactgagtttgttcaaagacaaaccgctcattatttacaagaatggaacatcaaagaaaggaggtcaggcacctgctccccctacacgcctctttcaagtccggagaaacctggcatctatcaccagaattgtggaggttgatgttgatgcaaattcactgaattctaacgatgtttttgtcctgaaactgccacaaaatagtggctacatctgggtaggaaaaggtgctagccaggaggaggagaaaggagcagagtatgtagcaagtgtcctaaagtscaaaaccttaaggatccaagaaggcgaggagccagaggagttctggaattcccttggagggaaaaaagactaccagacctcaccactactggaaacccaggctgaagaccatccacctcggctttacggctgctctaacaaaactggaagatttgttattgaagagattccaggagagttcacccaggatgatttagctgaagatgatgtcatgttactagatgcttgggaacagatatttatttggattggcaaagatgctaatgaagttgagaaaaaagaatctctgaagtctgccaaaatgtaccttgagacagacccttctggaagagacaagaggacaccaattgtcatcataaaacagggccatgagccacccacattcacaggctggttcctgggctgggattccagcaagtggtaaattggtatttgtaaaaagcaaacaaacattacaaggcagttatctcattgctgttttg

SEQ ID NO: 59 - DNA, 1448 bp, Homo sapiens
ccacgcgtccgcccacgcgtccggaggaacatggctcaagaaactaatcacagccaagtgcctatgctttgttccactggctgtggattttatggaaaccctcgtacaaatggcatgtgttcagtatgctataaagaacatcttcaaagacagaatagtagtaatggtagaataagcccacctgcaacctctgtcagtagtctgtctgaatctttaccagttcaatgcacagatggcagtgtgccagaagcccagtcagcattagactctacatcttcatctatgcagcccagccctgtatcaaatcagtcacttttatcagaatctgtagcatcttctcaattggacagtacatctgtggacaaagcagtacctgaaacagaagatgtgcaggcttcagtatcagacacagcacagcagccatctgaagagcaaagcaagtctcttgaaaaaccgaaacaaaaaaagaatcgctgtttcatgtgcaggaagaaagtgggacttactgggtttgaatgccggtgtggaaatgtttactgtggtgtacaccgttactcagatgtacacaattgctcttacaattacaaagccgatgctgctgagaaaatcagaaaagaaaatccagtagttgttggtgaaaagatccaaaagatttgaactcctgctggaatacaaaattcttgagcatctgcaaactaaaaattgacttgaggttttttttttcctagtcattgggaatgtagagcagtgtatcttgcatgtcatcggaagaatagatttttgttttggttttgttttgaaaatgactctgaacatttatttccattgcaatttctgtggctgaggagacttaaactttacaagtattatccttttaagatcattttaattttagttgagtgcagagggcttttataacaaacgtgcagaaattttggagggctgtgatttttccagtattaaacatgcatgcattaatcttgcagtttattttctcattgtgtatgtatatatcgcttttctctgcagcacgatttctcttttgataatgccctttagggcacaactagttatcagtaactgaatgtatcttaatcattatggctgcttctgttttttcattaacaaaggttattcacatgttagcatatagtttctttgcacccactatttatgtctgaatcatttgtcacaagagagtgtgtgctgatgagattgtaagtttgtgtgtttaaacttttttttgagcgagggaagaaaaagctgtatgcatttcattgctgtctacaggtttctttcagattatgttcatgggtttgtgtgtatacaatatgaagaatgatctgaagtaattgtgctgtatttatgtttattcaccagtctttgattaaataaaaaggaaaaccaaaaaaaaaaaaaaaaaaaaaaaaaaaaaaaaaaaaaaaaaa

SEQ ID NO: 60 - DNA, 2065 bp, Homo sapiens
ggcacgagagtcatcggggagagcaccatcgtgtctggggcctgctgccgcttcagccccccagtgcggaggctggtccgcttcctgggggtctactccttcggcctcttcaccacgaccatcttcgccaacgcgggcaggtggtgaccggcaatcccacgccacacttcctgtccgtgtgccgccccaactacacggccctgggctgcctgccaccttctccggatcggccaggtcccgaccgctttgtcactgaccagggtgcctgcgctggcagtcccagcctcgtggccgccgcgcgccgcgccttcccctgcaggatgcggccctctgcgcctacgcggtcacctacacagcgatgtacgtgactctcgtgttccgcgtgaagggctcccgcctggtcaaaccctcgctctgcctggccttgctgtgcccggccttcctggtgggcgtggtccgcgtggccgagtaccgaaaccactggtcggacgtgctggctggcttcctgacaggggcggccatcgccacctttttggtcacctgcgttgtgcataactttcagagccggccaccctctggccgaaggctctctccctgggaggacctgggccaagcccccaccatggatagccccctcgaaaagaacccgaggtctgcaggccgcattcgacaccggcacggctcaccccatccaagtcgcagaactgcgcccgccgtggccacctgatccccagctgtgtctcctccagggccccagccatgtgttcgtcgccccgtgtgccccgtcctcgattgaggtctgagccgacgcccttgcccctgcccctacccctgccagcgcccacccccagccagggcccctcgccttcctcccctggacctggggggccaggcgggggtggtggacgtggccggaagctgctgctgcccacgcccctgctgcgggacctgtacaccctgagtggactctatccctcccccttccaccgggacaacttcagcccttacctgtttgccagccgtgaccacctgctgtgaggcccgaccacccacccagaatctgcccagtccccacttcttccctgccacgcgtgtgtgtgcgtgtgccacgtgagtgccaaagtcccctgccccccaagccagccagacccagacattagaagatggctagaaggacatttaggagacatctgcctctctggccctctgagatatcccgatgggcacaaatggaaggtgcgcacttgcccctactattgcccttttaagggccaaagcttgaccccattggccattgcctggctaatgagaacccctggttctcagaattttaaccaaaaggagttggctccaaccaatgggagccttcccctcacttcttagaatcctcctgcaagagggcaactccagccagtgttcagcgactgaacagccaataggagcccttggtttccagaatttctagagtgggtgggcatgattccagtcaatgggggaccgcccgtgtctaagcatgtgcaaaggagaggagggagatgaggtcattgtttgtcattgagtcttctctcagaatcagcgagtccacctgtagggtggggggcaggctcccccatggcagggtccttggggtaccccttttcctctcagcccctccctgtgtgcggcctctccacctctcacccactctctcctaatcccctacttaagtagggcttgccccacttcagaggttttggggttcagggtgctgtgtctccccttgcctgtgcccaggtcatcccaaacccttctgttatttattagggctgtgggaagggtttttcttctttttcttggaacctgcccctgttcttcacactgccccccatgcctcagcctcatacagatgtgccatcatggggggcatgggtggagcagaggggctccctcaccccgggcaggcaaaggcagtgggtagaggaggcactgcccccctttcctgccccctcctcatctttaataaagacctggcttctcatctttaataaagacctgtttgtaacagaaaaaaaaaaaaaaaaaaaaa

SEQ ID NO: 61 - DNA, 706 bp, Homo sapiens
ggcttatcgtgaacctggccttggtggacctgggactggcactcactctccccttttgggcagccgagtcggcactggactttcactggcccttcggaggtgccctctgcaagatggttctgacggccactgtcctcaacgtctatgccagcatcttcctcatcacagcgctgagcgttgctcgctactgggtggtggccatggctgcggggccaggcacccacctctcactcttctgggcccgaatagccaccctggcagtgtgggcggcggctgccctggtgacggtgcccacagctgtcttcggggtggagggtgaggtgtgtggtgtgcgcctttgcctgctgcgtttccccagcaggtactggctgggggcctaccagctgcagagggtggtgctggctttcatggtgcccttgggcgtcatcaccaccagctacctgctgctgctggccttcctgcagcggcagcaacggcggcggcaggacagcagggtcgtggcccgctctgtccgcatcctggtggcttccttcttcctctgctggtttcccaaccatgtggtcactctctggggtgtcctggtgaagtttgacctggtgccctggaacagtactttctatactatccagacgtatgtcttccctgtcactacttgcttggcacacagcaatagctgcctgaacccaattgtctacgtcttaagccg

SEQ ID NO: 62 - DNA, 564 bp, Homo sapiens
  misc_feature (9): n equals a,t,g, or c
  misc_feature (451): n equals a,t,g, or c
  misc_feature (471): n equals a,t,g, or c
  misc_feature (477): n equals a,t,g, or c
  misc_feature (486): n equals a,t,g, or c
  misc_feature (500): n equals a,t,g, or c
cacgcgtcncccggagcattgcgtgcaggagccatggcgcgggagctataccacgaagagtttccccgggcrggcaagcaggcggggctgcaggtctggaggattgagaagctggagctggtgcccgtgccccagagcgctcacggcgacttctacgtcggggatgcctacctggtgctgcacacggccaagacgagccgaggcttcacctaccgcctgcacttctggctcggaaaggagtgttcccaggatgaaagcacagctgctgccatcttcactgttcagatggatgactatttgggtggcaagccagtgcagaatagagaacttcaaggatatgagtctaatgactttgttagctatttcaaaggcggtctgaaatacaaggctggaagcgtggcatctggattaaatcatgtttcttacgaacgactgacagccaagaggttcntacattgaaaggtctaaatngtgaanccacagaanttcccttactgggnagttcaaaaggtgatggttcatcatgacttggacgaattatcatggtgtggttccctgcaaaat

SEQ ID NO: 63 - DNA, 1210 bp, Homo sapiens
  misc_feature (58): n equals a,t,g, or c
  misc_feature (62): n equals a,t,g, or c
  misc_feature (1195): n equals a,t,g, or c
  misc_feature (1202): n equals a,t,g, or c
  misc_feature (1210): n equals a,t,g, or c
cagttgctagagggctatgcccggtactctgtgagtgtattccagccaccctttcagncagnccgcatggccttggagtctcagagccctggctgcaccacactgctctccacaggttccctggaggctggggacagcgagagagaccccattcagccacctgagctccagctggtgacccctatggctgagggggacacagggcttccccgggtgtgggcagcccctgaccggggtcctgtgcccagcaccagtggaatttcttctgagatgctggmcagtgsgcccattgaggttggctccttgccagctggcgagagggtgtcccgacccgaagctgctgtgcctgggtaccagcatccaagtgaagctatgaatgcccacacaccccagttcttcatctataaaattgattcatccaaccgagagcagcggctagaggacaaaggagacaccccactggagctgggtgacgactgtagcctggctctcgtctggcggaacaatgagcgcttgcaggagtttgtgttggtagcctccaaggagctggaatgtgctgaggatccaggctctgccggtgaggctgcccgggccggccacttcaccctggaccagtgcctcaacctcttcacacggcctgaggtgctggcacccgaggaggcctggtactgcccacagtgcaaacagcaccgtgaggcctccaagcagctgttgctatggcgcctgccaaatgttctcatcgtgcagctcaagcgcttctcctttcgtagttttatctggcgtgacaagatcaatgacttggtggagttccctgttaggaacctggacctgagcaagttctgcattggtcagaaagaggagcagctgcccagctacgatctatatgctgtcatcaaccactatggaggcatgattggtggccactacactgcctgtgcacgcctgcccaatgatcgtagcagtcagcgcagtgacgtgggctggcgcttgtttgatgacagcacagtgacaacggtagacgagagccaggttgtgacgcgttatgcctatgtactcttctaccgccggcggaactctcctgtggagaggccccccagggcaggtcactctgagcaccacccagacctaggccctgcagctgaggctgctgccagccagggactaggccctggccaggcctygacgaacccccagngttttcnttgagcgn

SEQ ID NO: 64 - DNA, 1362 bp, Homo sapiens
  misc_feature (1277): n equals a,t,g, or c
  misc_feature (1303): n equals a,t,g, or c
  misc_feature (1315): n equals a,t,g, or c
  misc_feature (1353): n equals a,t,g, or c
  misc_feature (1360): n equals a,t,g, or c
gcggcacgagccgggtcctgcaggggcgacgcgaggcctcttttgaaagatgcggccctgaccctgtgaacctcgcgcagagcggcctgaagcgagaggttgaggctgggaggtgggagcaacggcggcggcggccgcctgcgagcccccggcctgaggcgcagcagcagctgcccgtcttcccacatagagggcaggaaggacaactttggtgagaaaatggctagcaacaatcattggtttcagagttcgcaggtccccagctttgcccagatgctgaaaaagaacctgccagttcaaccagcgacaaagacgataactacacccacaggatggtcctcagaaagttacggcctgtccaagatggcatccaaggttacgcaagtaacgggtaattttccagagccgttgctttccaagaatctttcatctatttcaaatcctgtccttcctccaaaaaaaatacctaaggaatttataatgaaatacaaacgtggagagataaatcctgtgtcagccttgcaccagtttgcacaaatgcagcgagttcagcttgaccttaaggaaactgtgacaacaggtaatgttatgggaccatattttgccttttgtgctgtggtggatggtattcagtacaagactggactgggacaaaataaaaaggagtctagatccaatgcagcaaaattagctcttgatgagcttctacaactggatgaacctgaaccacgaattttagaaacatcaggtcctcctcctttccctgcagaacctgttgttttatctgaactagcatatgtttcaaaagtacattatgaagggagacatattcaatatgcaaagatttcacagatcgttaaagaaagatttaatcaactaatttctaatcgttcagaatacctgaaatatagcagttcattggctgcttttataattgaaagagctggacaacatgaggttgtagctataggcacaggtgaatacaattacagccaggacattaagccagatggaagagtattgcatgacactcatgctgttgttacagcaagaaggtctcttcttagcaaaaatcctgctatgatggaaaaatcaatattttgtacagaaccaacttctaatctactcactcttaaacagaatatcaacatttgcctttacatgaaccagttgcctaaaggatcagcccagattaagtcacagttaccgtcttaatccacattctatatctgcatttgaagccaatgaagaactctgtctccacgtggctgttgaangcaaaatttatctgactggttactgncctaaagatggnggtaataggaataagcagtatgtcctcaagtgacaaantgaccanat

SEQ ID NO: 65 - DNA, 520 bp, Homo sapiens
  misc_feature (69): n equals a,t,g, or c
tgataattgaaaaactggcagaagggcttgacattcaactcaaatctccagtgcagtgtattgattatnctggagatgaagtgcaggttaccactacagatggcacagggtattctgcacaaaaggtattagtcactgtaccactggctttactacagaaaggtgccattcagtttaatccaccgttgtcagagaagaagatgaaggctatcaacagcttaggcgcaggcatcattgaaaagattgccttgcaatttccgtatagattttgggacagtaaagtacaaggggctgacttttttggtcacgttcctcccagtgccagcaagcgagggctttttgccgtgttctatgacatggwtccccagaagaagcacagcgtgctgatgtctgtgattgccggkgaggctgtcgcatccgtgaggaccctggacgacaaacaggtgctgcagcagtgcatggccacggtccgggagctgtttcaaggagcaggaggtcccagatcccacaaagtattttt

SEQ ID NO: 66 - DNA, 506 bp, Homo sapiens
catgaccctggaggagaagtctgaattcaagcaaagggttcgcaaggagcttgaagtaaatggcattgaattctacccccagaaggaatttgatgaggatttggaggataagacggagaatgacaaaatcaggcaggagagcatgccttttgctgtggtgggaagtgacaaggagtaccaagtgaatggcaagagggtcctcggccgaaaaactccatgggggatcatcgaagtggaaaacctcaaccactgtgagtttgccctgcttcgagactttgtcatcaggacccacctccaggacctcaaggaagtgacacacaacatccactatgagacttacagggccaagcggctcaatgacaatggaggcctccctccgggagaaggcctcctgggcactgtccttccacctgtgccagccaccccctgccccactgctgaatgaaggccatttcaagcgctgcttctcactccattcctctcagctgttattgctggaggccaac

SEQ ID NO: 67 - DNA, 1132 bp, Homo sapiens
cttacttcggctgtctccgctgccctccagcggagacgcagctcctcaggcgcccggcggtatttgttgggtcggcggcgtcagggattcgcagtggcctgtggtcggcgtcgtccggccactggtgcgcccccgcggcaggcagagctcacgctcctgtcccccggctggtccggggtctgggcgccgcgtcgacggcggcyccgcaggacgcgcagaccgggccgcagcccatgccccgagcggactgcattatgaggcacctgccttacttctgccggggtcaagtggtgcggggcttcggccgcggctccaagcagctgggcatccccacagctaattttcctgagcaagtggtagataatcttccagctgatatatccactggtatttactatggttgggccagtgttggaagtggagatgtccataagatggtggtgagcataggatggaacccatattacaagaatacgaagaagtctatggaaacacatatcatgcataccttcaaagaggacttctatggggaaatcctcaatgtsgccattgttggctacctgagaccagaaaagaactttgattctttagagtcacttatttcagcaattcaaggtgatattgaagaagctaagaaacgactagagttaccagaacatttgaaaatcaaagaagacaatttcttccaggtttctaaaagcaaaataatgaatggccactgatgaaaaattgtattatttattcattcactgttttctagtgtttctgtgtttattactgttcagcatcatcttggttatatactgaaaatcaaacactttactacagttgtgaattagtttaaaccgtacaatgttgttatcatatcatgcttcaactattaaattaagcccatcatatcatagcactaaaaagattgagttaaaaataagatttaaaaaatatatattgattaaaatgtaccactagaaaggtrttacatgtgtataagtatgggtaaaaaggcaagtcactagtttgagatgaaaactaaaattttcatggtaaaatgccagcatgtatgtacttgtgtagtgtgtacttctaaacagagaaggcttataaagtaatgattaaggccaagtcagtggta

SEQ ID NO: 68 - DNA, 954 bp, Homo sapiens
  misc_feature (376): n equals a,t,g, or c
  misc_feature (906): n equals a,t,g, or c
cgggcaggataaattcaaccaggtcatggcagggattgatgctgcatttraggccggttttgagaaggtcaaagtcaataccgtgctgatgcgtgatgttaatcatcaccagctcgacacctttctgaactggatccagcatcgccctatccagctgcgtttcatcgaactgatggaaacgggcgagggcagcgagctcttccgtaagcatcacatctctggtcaggttctgcgtgacgagctactgcgtcgcggctggatccaccaattacgtcaacgcagcgacggtcccgcgcaagtcttttgccatccagattacgccggagagattggccttatcatgccgtatgaaaaagacttctgcgccacttgcaanccctgcgcgtttcctccattggtaaactccatctctgcctgtttggtgaaggcggcgttaactgcgcgatctgctggaagacgccttttaagaatgcctggctgaaacggctgcgggaagggatgccggagtgcgtcgctgcgccaaaagttcgtagtagcggatcgatagagccctcgccatccattacgctgaattatcctcgtcagtctttcgatactgcgcattttccggtggaagaaaaagcggcgattgcgcaattacgccagttttgccagaacggtgccggagaatatgagcaacaacgagattttccggcagtggaaggcaccagccgtttgtcggccagcctggcaacgggcgggttatcgcytcgccagtgcttgcatcgcttgttggctgaacagcggcaggcttgggacggtggggccggtagtgtctggcttaatgagcttgatctggcggatttttaccgtcacctgataacgtattcacccctcgttgtgtaaacatcgtccattttatttgcntggacggatcgtgtacagtgggcagagcaattcccgacatttacaggc

SEQ ID NO: 69 - DNA, 1397 bp, Homo sapiens
ggcacgagggcttttctcgtcagctgccctgaggggagagcggactgtgccagtgagtcggcgtgcagcagcgacagcctggacgaggccagatcgtccggctcggaagggacgccggcagacacgggtgacctctcgcctggccacggcgcgtcagcgccctcggtgtccagagaggctcgccaaacggtgccgcccctgacggtcaggctgcacacacagagcgtgtcggagtgcatcacggaggacggcaggactgtggccgtgggggacatcgtctggggtaagatccatggttttccttggtggccggcgcgtgttcttgacatcagtctcggccagaaggaggacggagagccgtcttggcgagaagcgaaggtctcgtggtttggttctccgactacgtcgttcttgtctatttcaaaactctcccctttctctgaatttttcaaactgagatttaatcgtaagaagaaggggatgtatcggaaagctataaccgaggctgcaaatgccgcaagacacgtggccccggaaatcagggagctcttaacccagtttgaaacgtaactggttccctgaccaggtcaccgacgatgagggcgcacctgctgtcctggagcttccgatctctgttcggggaccctgtgagccttctggccggctgcgtgcagagcccactgggcacggtggtcggcctggtgtgaggccccccggggaccggcagtgtgtccagggaggggatggccctgagcccagcggctcctcccgctgagtgtatttcttcccaccactcagcgcatggctgccctggctcacgaggcagtcgggactcgtgacttgctggctgctggctgctgctgcctcgcgcgctggggttccatggaggaactgggcctgtcgccccggcctcacctgctgcccgcatgctggggtcccatggaggaaccaggcctggcgccccggcctcgcccagcggctggtgtgggcagctgttccctgcctcgcagtgtcctggaggcagctgtctcgcagactcagcttggtctcccgcaggcttcagaaaaacccaattgcacgtgtgggattcttccccagcccttgggtgcggggtctctgtgcacttgagagctgggggacccacccgccgtctcccactccaagttcatcccagagcgtggggcccgctgggcacctggcacctggcctgcagatgctgctacgagtgaccagtgctgtgtggaggaggccaagggcggcccctgggaaaccgggcttcaacagtacaaggaaaagaaacttgctctgttttgtaagagcgtgttccttttcctcttttttgtccctttaaagaccaaaaagaataaagaaagaaaagaaaaaaaaaaaaaaaaaaa

SEQ ID NO: 70 - DNA, 817 bp, Homo sapiens
  misc_feature (684): n equals a,t,g, or c
  misc_feature (750): n equals a,t,g, or c
  misc_feature (796): n equals a,t,g, or c
  misc_feature (798): n equals a,t,g, or c
cctacaccatctaccggcctgacgagggttactgccaggcccaggcccccgtggctgcggtcctgctcatgcacactgcctgcggagcaagccttttggtgcctggtgcagatctgcgacaagtacctcccaggttactacagtgcagggctggaggccattcagctggacggggagatcttttttgcactcctgcgccgggcctccccgctggcgcatcsccacctgcggcggcagcgcattgaccctgtgctctacatgacggagtggttcatgtgcatcttcgcccgcaccctgccctgggcgtcggtgctgcgtgtctgggacatgtttttctgtgaaggcgttaagatcatcttccgggtggccctggtcctgctgcgccacacgctgggctcagtggagaagctgcgctcctgccaaggcatgtatgagaccatggagcagctgcgtaacctgccccagcagtgcatgcaggaagacttcctggtgcatgaggtgaccaatctgccggtgacagaagcactgattgagcgggagaatgcagcccagctcaagaagtggcgggaaacgcggggggagctgcagtatcggccctcacggcgactgcatgggtcccgggccatccacgaggagcgccggcggcaacagccacccctgggcccctcctccagcctyctcagnctccctggcctcaagarccgagctyccggcagctggaggggccccgtccccgccgcccccgtccgnagagccagtgctgggcctgccccaaggcctgtgggtcacttgctgnanggactgcatccatcccttt

SEQ ID NO: 71 - DNA, 739 bp, Homo sapiens
  misc_feature (632): n equals a,t,g, or c
  misc_feature (649): n equals a,t,g, or c
  misc_feature (668): n equals a,t,g, or c
  misc_feature (713): n equals a,t,g, or c
  misc_feature (720): n equals a,t,g, or c
cgtccattgccagtgccattgtaaatgaactcaagaaaataaatcaaaatgttgctgccttacctgtggcgtcctcagtgatggacagattgtcttacctcttacctagtgcacgtccagaactcggagtggggccaggccgttctgtagacagatcactgatgtatagtgaagctaacagacgggagacatttacctcatggcctcatgtaggctataggtgggcacaaccagatcccaygrgctcaagctggattttatcatcagcctgcctcatctggagatgatagagccatgtgttttacttgtagtgtatgcctcgtttgttgggaacctactgatgaaccttggtctgaacacgaaagacattccccaaactgcccatttgtgaaaggtgagcacacacagaatgtgccattgtcagtcactcttgcaacaagtcctgcacagtttccttgtacggatggaactgacagaatatcttgctttgggtcggggagctgccctcattttctagctgctgcaactaaacgaggaaagatctgcatatgggatgtttccaaacttatgaaggtgcacttaaagtttgaaattaatgcctatgatccagcaattgtacaacagcttattcnatcaggagacccaagcncccggagttgattcaaggngaccaactttggcgtggctggaaggactcctctaagttgctcagntatgccnaaattggaaggagatagtg

SEQ ID NO: 72 - DNA, 2488 bp, Homo sapiens
ggtaccggtccggaattcccggggctaagataaaggatgatcttgaagaccttatagttattgggatgagagcaaaacattggtgacatttttctgaaatattcaaaagatttggtaaaaacctaccctccctttgtaaacttctttgaaatgagcaaggaaacaattattaaatgtgaaaaacagaaaccaagatttcatgcttttctcaagataaaccaagcaaaaccagaatgtggacggcagagccttgttgaacttcttatccgaccagtacagaggttacccagtgttgcattacttttaaatgatcttaagaagcatacagctgatgaaaatccagacaaaagcactttagaaaaagctattggatcactgaaggaagtaatgacgcatattaatgaggataagagaaaaacagaagctcaaaagcaaatttttgatgttgyttatgaagtagatggatgcccagctaatcttttatcttctcaccgaagcttagtacagcgggttgaaacaatttctctaggtgagcacccctgtgacagaggagaacaagtaactctcttcctcttcaatgattgcctagagatagcaagaaaacggcacaaggttattggcacttttaggagtcctcatggccaaacccgacccccagcttctcttaagcatattcacctaatgcctctttctcagattaagaaggtattggacataagagagacagaagattgccataatgcttttgccttgcttgtgaggccaccaacagagcaggcaaatgtgctactcagtttccagatgacatcagatgaacttccaaaagaaaactggctaaagatgctgtgtcgacatgtagctaacaccatttgtaaagcagatgctgagaatcttatttatactgctgatccagaatcctttgaagtaaatacaaaagatatggacagtacattgagtagagcatcaagagcaataaaaaagacttcaaaaaaggttacaagagcattctctttctccaaaactccaaaaagagctcttcgaagggctcttatgacatcccacggctcagtggagggaagaagtccttccagcaatgataagcatgtaatgagtcgtctttctagcacatcatcattagcaggtatcccttctccctcccttgtcagccttccttccttctttgaaaggagaagtcatacgttaagtagatctacaactcatttgatatgaagcgttaccaaaatcttaaattatagaaatgtatagacacctcatactcaaataagaaactgacttaaatggtacttgtaattagcacttggtgaaagctggaaggaagataaataacactaaactatgctatttgatttttcttcttgaaagagtaaggtttacctgttacattttcaagttaattcatgtaaaaaatgatagtgattttgatgtaatttatctcttgtttgaatctgtcattcaaaggccaataatttaagttgctatcagctgatattagtagctttgcaaccctgatagagtaaataaattttatgggygggtgccaaatactgctgtgaatctatttgtatagtatccatgaatgaatttatggaaatagatatttgtgcagctcaatttatgcagagattaaatgacatcataatactggatgaaaacttgcatagaattctgattaaatagtgggtctgtttcacatgtgcagtttgaagtatttaaataaccactcctttcacagtttattttcttctcaagcgttttcaagatctagcatgtggattttaaaagatttgccctcattaacaagaataacatttaaaggagattgtttcaaaatatttttgcaaattgagataaggacagaaagattgagaaacattgtatattttgcaaaaacaagatgtttgtagctgtttcagagagagtacggtatatttatggtaattttatccactagcaaatcttgatttagtttgatagtgtgtggaattttattttgaaggataagaccatgggaaaattgtggtaaagactgtttgtacccttcatgaaataattctgaagttgccatcagttttactaatcttctgtgaaatgcatagatatgcgcatgttcaactttttattgtggtcttataattaaatgtaaaattgaaaattcatttgctgtttcaaagtgtgatatctttcacaatagcctttttatagtcagtaattcagaataatcaagttcatatggataaatgcatttttatttcctatttctttagggagtgctacaaatgtttgtcacttaaatttcaagtttctgttttaatagttaactgactatagattgttttctatgccatgtatgtgccacttctgagagtagtaaatgactctttgctacattttaaaagcaattgtattagtaagaactttgtaaataaatacctaaaacccaagtgtaaaaaaaaaaaaaaaaaaaaaa

SEQ ID NO: 73 - DNA, 1627 bp, Homo sapiens
  misc_feature (474): n equals a,t,g, or c
gtaatatgtgaaaggatttgataatgcaatggaattggttaaaaacatgacagaacgtattccccagttcaaatcagtggttgaagaaattcagaaacagaaaatctgtgggagcttaactttgcagcatcacatgctagaacctgttcagcggattccccggtatgagatgctccttaaggactatctaaggaaattgcctcctgattccctggactggaatgatgctaaaaaatcacttgaaattatatctacagcagcaagccattctaatagtgcaataaggaaaatggagaacctaaagaaactcttagagatttatgaaatgttgggagaagaagaagacattgtaaacccttcaaatgaactaataaawgaaggacagatcctcaaactagctgctcgraacacttcagcacaagaacgctaccttttcttattcaacaacatgttgctgtactgtgtgcccaaatncagcttggtaggctctaaattcacagttcgaamcagggttggcattgatggaatgaaawttgtagagactcaaaatgaagaatatccacatactttccaggtgtctgggaaagagagaacactggaactgcaggccagttctgcgcaagacaaagaagaatggatcawggcccttcaagaaaccatcgatgcttttcatcaaaggcatgaaaccttcagaaatgcaattgcraaggataatgacattcactcagaggtttctactgctgagctagggaaaagagccccaagatggatccgagataatgaagtgacaatgtgtatgaaatgtaaagaacctttcaatgcactgacacgaaggaggcatcattgtcgagcatgtggatatgtggtttgttggaaatgctccgactacaaagctcaacttgaatatgatggtggtaaattgagcaaagtttgtaaagactgttatcaaatcataagtggattcacagacagtgaagaaaagaaaagaaaaggaattttagagattgaatcagcagaagtatctggaaacagtgtggtgtgcagctttcttcagtatatggagaagtcaaaaccttggcagaaagcttggtgtgtgatccccaagcaagaccctcttgtgctgtacatgtatggtgccccccaggacgtcagagcccaggccaccattccacttctgggctatgtggtggatgaaatgccaaggagcgcagacctgccacacagtttcaaactgacccagtctaagtccgtgcacagctttgctgcagacagtgaggaactgaagcagaagtggctgaaagtcatccttttagctgtcacaggtgagacaccaggtggtccaaatgagcatccagccaccttggatgatcatcctgaacctaagaaaaaatcagaatgctgaactcctccaggaccagccatggtgtggaggtctcaggacttacagctcaagacattcccagctcttcttacacatctgctagcactttatgttgaaaaatataggcccataaatgcatcttttgaggactattttcctatgtttatgtactcttagtgaaattagtgtgcagagtcattctaccgataaagttttgaaataatgtgaaaaaaaaaaaaaaaaaaa

SEQ ID NO: 74 - DNA, 1619 bp, Homo sapiens
  misc_feature (131): n equals a,t,g, or c
  misc_feature (223): n equals a,t,g, or c
  misc_feature (1087): n equals a,t,g, or c
  misc_feature (1159): n equals a,t,g, or c
  misc_feature (1594): n equals a,t,g, or c
  misc_feature (1603): n equals a,t,g, or c
gggcgcgggaagcacagcccggccctccaggtccccaaggagaccccagcctcctgctgcccactgtgagcgacctccccggggctcctctggaagcggctccggcaagtatcgagtttgcctgtgcggantgggggagcctccggctttcctgtttgctttgttaattattttcgtccccagaggaaggcgggccggccccctcattccctgctgggccccncctccctgaagatctacacagcagatctactcacaaaagtccacccagcagaagcaggaggatggtggttgtgggtcctctgtgagcagccctgttaacctttaaaccagcacggccgccgcagctgtgagcctagcacctgatcagtggagagctgtggattgcatgtttgtttgccattgcccccgccamcctgcaagttgcaccttctagaatcagcaagccaagctcctctcacccagcgtaatgatgcggaaatgcaaatgcaccatcatgttgtgacccatattgcgaaaattagaaaaaaggaagttgtgtttcgctattgcacgaattcagcccagaggagaaactcgctcgccttcagaagacagtacctcctaaatggctctactttgaacctgctgggcaaggaagagattttcaaggaaaccatctaccgtgtgcaagctcctgccggccaaccccagaccccagcacggagccaggcgcctgtgcccgccraccctcagcatcctcctcagaaaggctggtggcatcaggaagcccctggccagcctccacctgagcccagtgagctcagctttaaggatggagtcaggcagggggtcctcaacccctccaggacccattgctgccctagggatgccagacactgggcctggcagttcctccctagggaagcttcaggcgctccctgttgggcccagagcccactgtggggaccctgtcagcctggctgcagcaggggacggctctccagacataggccccacgggagagctgagtggtagcttaaagatccccaaccgggacagcgggatcgacagtccmtcctccagtgtggctggagagaactttccntgcgaggagggcttggargctggcccaagccccactgtactgggggcgcacgcaragatggcyctggacagncaggtcccgaaggtcaccccccargargaggcggacagcgacstgggtkaggaacctgactytgagaacaccccccagaaggctgacaaggatgccggcctggcccagcactctggcccccagaagcttctccacattgcccaggagctcctgcacaccgaggagacctatgtgaagcggctgcacctgctggaccaggttttytgcaccaggctgacggatgmggggatccctccagaagtcatcatgggcatattctctaacatctcctccatccaccgcttccacgggcagttcctgctgccggagctgaagacgcggatcacggaggagtgggacacaaacccacgggcttcggggacatcctgcagaagctggccccatttcctgaagatgtaccggcgagtatgttcaagaactttgaccgagccgtanggctgggtnaagcacgtggacccag

SEQ ID NO: 75 - DNA, 698 bp, Homo sapiens
ggcacgagggctgaaagcacgttaccagacaatgagcatcttgcccatggagctatataaagagtttgcagagtatgtcaccaaccattatcggatgctgtgtgcagtcttggagcccgccctgaatgtcaaaggcaaggaggaggttgccagtgcactagttcacatcctgcagagtacaggcaaggccaaggacttcctttcagacatggccatgtctgaggtagaccggttcatggaacgggagcacctcatattccgcgagaacacgcttgccactaaagccatagaagagtatatgagactgattggtcagaaatacctcaaggatgccattggagaattcatccgtgctctgtatgaatctgaggaaaactgcgaggtagaccctatcaagtgcacagcatccagtttggcagagcaccaggccaacctgcgaatgtgctgtgagttggccctgtgcaaggtggtcaactcccactggtgagactgggaacgctgggctggggggccagggtcgggggaattatgtgttcatctgttcatctatctgtccatcctcaaagaggactgagcaccatttatgggcaaagcattgttctaggcgctatagagcaaacaggtgaaagaggcctggtccctgccctcagagggcctccaccagaatggggacaaattagaaaaaaaaaaaaaaaaaa

SEQ ID NO: 76 - DNA, 1510 bp, Homo sapiens
aagcactgacttgtaggtcttcaggtggtaatcacggtctttgatcaccggggtgtagaggctgtgaagacggcagtaaagcctcacacccttggacatgatgtcctccagctcacttcgggccttgtaggtgccatcgtcgtagcggaagcgatacatcacctgctcattcttgaactggtgcttgtcggaaacatggtggatgatgccattctccaacagggcttggcccaagttgactccttcttccgtcttgctgatttcaccaatttctaggagccaggcaacgaactcattgccaagaaagcacttggggacagtgctcagctttctccggcggtccttgatgaggttcaccttcttgttcatcatcatgtggtacagcttctcccccttctccgcaatcatgacgtaggcatcacgctccatgcccagcttcaggctctcgcgctgctcccgctcgcggatgatggcatccagccacttctgcttctcctctgccgtcttggccatgcagacaaaccacttattcttggccgtgttgtggatcttccagccgttggtgacggtatagccgttgctatggtaatccgctgtcccatcttccacattctccacctccatgacttcagtgttgattcgacccctgaagatgtagagggagccgttgatggatttggtcctcttggtggacttcttgctcccggtgaccctggatttccgcttgcagtagacgagaaggttgtcgaagaggaagaaggccctttcctggatgttgcccgcagagatctttaacaaagtcccttgcaggaggagctgagtgcagatgtctgtgaggttggaaccctcccagccttcgatgtgggactgcagctgctccagggcttccagcttctccatctgccgcttggtctcattgatgttggagcaaacggtcttcatggcctgcagggcactctggaccgcggggtggtctgggtgcttgccgggagtcctcttggccagctccttaaggaggagcgggtacttgcagatcctctggatcggagacaacaggtagccttccaaagggatgtccgtggtcttccggcctcccagaagcatgcagctcaaaaggaaggcgcgcacggtagggatcttgttcagctccaccagcagcctcagggctttctcatggttgctgcaatactcctcgtacacgcagaacttgtccttgaattttaagaaaacattcccaagttcatgctgagactgcggctccgggtgtaaacaatactccaaggcggccaagaaatccttatgaacttccaggatgtcttcgatgttcgagaacaggaccttgacattctcctccgtgaggcccttctccactgagtcggccacgttctgccggatgcgatgcaggaatgccgactgcaagaagcgcaaggtgcccacgtagtccctctcggtgcccaagatctcgttgaggacgcagaggcggaggcgcagctggcgctcggactcccgg

SEQ ID NO: 77 - DNA, 466 bp, Homo sapiens
  misc_feature (301): n equals a,t,g, or c
  misc_feature (346): n equals a,t,g, or c
  misc_feature (404): n equals a,t,g, or c
  misc_feature (423): n equals a,t,g, or c
ttagcaggctgtgcccacaagctgatgtgccagtcacccgtcaccctccctctacccccgacccatccagcaccgacccctgccaggctgtgacagtaactgacctctccctcactgccccgccccctgtcagaccctgacccttcccaaaccctggcccctccctaacccctcttgaccccgcccactggaactgacaatccccactgacctgtgctgtgcccccagctccctggccctgctccgggagctgtcgttgtctccgccagcagccctgtggctgcaggagcgccaggcccancttcgccactcgctgcccctgcaaagcttcctgctgaaacctgtncagcgcattctcaagtaccatctgctgctgcaggaactagggaagcacttgggcgganggcccaaggcactgggggnccgccagatggttggaggaaactattgtgtccattgaaagcgg

SEQ ID NO: 78 - DNA, 1450 bp, Homo sapiens
  misc_feature (1390): n equals a,t,g, or c
  misc_feature (1445): n equals a,t,g, or c
  misc_feature (1447): n equals a,t,g, or c
gcgatcatctttatctcggctctgaatggaatgcatccaatctggaggaactgcagggctcaggggttgattacattttaaatgttaccagagaaatcgataatttttttcctggcttatttgcatatcataacatccgagtctacgatgaagagaccacagacctcctcgcccactggaatgaagcgtatcattttataaacaaagcgaagaggaaccattccaagtgcctggtgcattgcaaaatgggcgtgagtcgctcggcctccacagtcatagcctatgcaatgaaggaattcggctggcctctggaaaaagcatataactatgtaaagcagaagcgcagcatcacgcgccccaacgcgggctttatgaggcagctgtctgartatgaaggcatcttggatgcaagcaaacagcggcacaacaagctgtggcgtcagcagacagacagcagcctccagcagcctgtggatgaccctgcaggacctggcgacttcttgccagagaccccagatggcaccccggaaagccagctgcccttcttggatgatgccgcccagcccggcttagggccccccctcccctgctgtttccggmgactctcagacccccttytgccttcccctgaggatgaaactggcagcttggtccacctggaggatccggagagggaggctctgttggaggaagctgctccmcctgcagaggtgcacaggccggccagacagccccagcaaggttccggactctgtgagaaggatgtgaagaagaaactagagtttgggagtcccaaaggtcggagcggctccttgctgcaggtggaggagacggaaagggaggagggcctgggagcagggaggtgggggcagcttccaacccagctcgatcaaaacctgctcaactcggagamcctaaacaacamcagcaagaggagctgtcccaacggcatggaggatgatgctatatttgggatccttaacaaagtgaagccttcctataaatcctgtgccgactgcatgtaccctacagccagcggggctcctgaggcctccagggagcgatgtgaggaccccaatgctcccgccatctgcacccagccagccttcctaccccacatcacgtcctccsctgtggcccacttggccagcaggtcccgtgttccggagaagccagcctctggcccaaccgaacctcccccgttcctaccaccagcaggctccaggagggcagacaccagtggccctggggctggagctgccctagagccaccagccagccttttgggaacyttccagagagaccccaaaattctggccaaagtccttcttttgaagaatctcatgtggataagaaccttcccagcacagaatggttaataaaggaagancgttaaccaagaaagtttggaagccagccaaggacttgaggtttttgtttcagtnangga

SEQ ID NO: 79 - DNA, 732 bp, Homo sapiens
  misc_feature (583): n equals a,t,g, or c
  misc_feature (608): n equals a,t,g, or c
  misc_feature (620): n equals a,t,g, or c
  misc_feature (621): n equals a,t,g, or c
  misc_feature (673): n equals a,t,g, or c
  misc_feature (691): n equals a,t,g, or c
  misc_feature (706): n equals a,t,g, or c
cagctctaatacgactcactatagggaaagctggtacgcctgcaggtaccggtccggaattcccgggtcgacccacgcgtccgcacatgttggttcaaggtctagaaccaaacaccaaatacgaatttgccgttcgattacatgtggatcagctttccagtccttggagccctgtagtctaccattctactcttccagaagcaccagcaggcccaccagttggagtaaaagtgacattaatagaggatgacactgccctggtttcttggaaaccccctgatggcccagaaacagttgtgacccgctatactatcttatatgcatctaggaaggcctggattgcaggagagtggcaggtcttacaccgtgaagggscaataaccatggctttgctagaaaacttggtagcaggaaatgtgtacattgtcaagatatctgcatccaatgaggtgggagaaggacccttttcaaattctgtggagctggcagtacttccaaaggaaacctctgaatcaaatcagagcccaagcgtttagattctgctgatgccaaagtttattcaggatattaccatctggaccanaaatcaatgactggcattgctgtangtgttggcatanncttgacctgcatcctcatctgtgttctcatcttgatatacccgaagtaaagncaggaaatcatctgcttncaagacggcacacantggaactcaacagttaccttgtacca

SEQ ID NO: 80 - DNA, 803 bp, Homo sapiens
agatgtcatagacttaaaaaaaggagtggctcattttgaaaggattggaggagaatctgttggggatttgatgataaggaatattcagttacatcattcaggaatatctctgcacagtacaaacaaccctagaaagtttatctgcagtagccgatatcattgttagaggtccaccaggtcctcctgaggatgtgcaagtggaagacatttccagtactacttctcaactaagttggagagcaggcccagataataacagtcccattcaaatatttactattcagactcggacaccattttctgtgggttggcaggctgttgctacagttccagaaattctcaatggtaagacatacaatgcaacagtggttggtttgagtccttgggtggaatatgaatttcgtgttgttgccggcaacagcattgggattggagaaccaagtgaaccatcagaattgttaagaactaaagcatcagtccctgttgtggcaccagtaaacatccatggaggtggaggaagtcggtctgaactcgtcattacgtgggagtcaattccagaagaactgcagaatggggagggatttggatatatcatcatgttccggccagtgggctcgacaacctggtccaaggagaaagtgtcatctgtggaatcatcaaggtttgtctacagaaatgaaagcatcatcccactgtctccckggtgaagtcaaagtgggtgtgtataataatgaaggagaaggatccctgagtactgtgaccattgtctactctggggaagatgaacctcaactggccccaag

SEQ ID NO: 81 - DNA, 1100 bp, Homo sapiens
  misc_feature (938): n equals a,t,g, or c
  misc_feature (1080): n equals a,t,g, or c
atcatcaacgttactaaatcagacgctgggagttatacctgtatagccactaaccattttggaactgctagcagtactggaaacttggtagtgaaagatccaacaagggtaatggtacccccttccagtatggatgtcactgttggagagagtattgttttaccgtgccaggtaacgcatgatcactcgctagacatcgtgtttacttggtcatttaatggacacctgatagactttgacagagatggggaccactttgaaagagttggagggcaggattcagctggtgatttgatgatccgaaacatccaactgaagcatgctgggaaatatgtctgcatggtccaaacaagtgtggacaggctatctgctgctgcagacctgattgtaagaggtcctccaggtcccccagaggctgtgacaatagacgaaatcacagataccactgctcagctctcctggagacccgggcctgacaaccacagccccatcaccatgtatgtcattcaagccaggactccattctccgtgggctggcaagcagtcagtacagtcccagaactcattgatgggaagacattcacagcgaccgtggtgggtttgaacccttgggttgaatatgaattccgcacagttgcagccaacgtgattgggattggggagcccagccgcccctcagagaaacggagaacagaagaagctctccccgaagtcacaccagcgaatgtcagtggtggcggaggcagcaaatctgaactggktataacctgggagacggtccctgaggaattacagaatggtcgaggctttggttatgtggtggccttccggccctacggtaaaatgatctggatgctgacagtgctggcctcarytgacgcctctagatacgtgttcaggaatgagagcgtgcacccttctctcctttgaggttaaantaggtgtcttcaacaacaaaggagaaggcctttcagtcccaccaggtggtgtattctgcagaagaagaacccaccaaaccaccagccatatctttgccagaagtctttctgccacagtattgaagttttctgggcctcccantggagaaggttagaggacgg

SEQ ID NO: 82 - DNA, 253 bp, Homo sapiens
  misc_feature (250): n equals a,t,g, or c
tttcgaaaaagctatttaggtgacactatagaaggtacgcctgcaggtaccggtccggaattcccgggtcgacccacgcgtccgaagtaataatgaccgcctataacatcatcggcgagagcccagccagcgcgcccgtggaggtctttgtcggcgaggctgccccggccatggccccgcagaacgtgcaggtgaccccactcacggccagccagctggaggtcacgtgggacccaccacccccggagancca

SEQ ID NO: 83 - DNA, 1458 bp, Homo sapiens
ctcgtgccgaatcggcacgagaaggagtgcgagcactgcgactgcctgcagggcttccagctcacgcactcgctgggcggcggcacgggctcaggcatgggcacgctgctcatcagcaagatccgtgaggagttcccggaccgcatcatgaacaccttcagcgtcatgccctcgcccaaggtgtcggacacggtggtggagccctacaatgccacactgtcggtgcaccagctggtggagaatacagacgagacctactgcatcgacaacgaggcgctctatgacatctgcttccgcactctgaagctgacaacgcccacctacggggacctcaaccacctggtgtccgccaccatgagtggggtcaccacctcgctgcgcttcccgggccagctcaatgctgacctgcgcaagctggcggtgaacatggtgcccttcccgcgcctgcacttcttcatgcctggcttcgcgccgctcaccagccgcggcagccagcagtaccgggccctgaccgtgcccgagctcacccagcagatgttcgacgccaggaacatgatggccgcctgcgatccgcgccatggccgctacctgaccgtggccaccgtgttccgcgggcccatgtccatgaaggaggtggacgagcagatgctggccatccagagtaagaacagcagctacttcgtggagtggattcccaacaacgtgaaggtggccgtgtgcgacatcccgccccgcggcctgaagatggcctccaccttcatcggcaacagcacggccatccaggagctgttcaagcgcatctccgagcagttctcagccatgttccggcgcaaggccttcctgcactggttcacgggtgagggcatggatgaaatggagttcaccgaggcggagagcaacatgaacgacctggtatccgagtaccagcagtaccaggatgccaccgccaatgacggggaggaagcttttgaggatgaggaagaggagatcgatggatagtcggaatagagccgccccaactcagatcctacaacacgcaagttccttcttgaaccctggtgcctcctaccctatggccctgaatggtgcactggtttaattgtgttggtgtcggcccctcacaaatgcagccaagtcatgtaattagtcatctggaacaaagactaaaaacagcagagaattgcgggttctacccagtcagaagatcacaccatggagactttctactagaggacttgaaagagaactgaggggccacaaaataaacttcaccttccattaagtgttcaagcatgtctgcaaattaggagggagttagaaacagtctttttcatcctttgtgatgaagcctgaaattgtgccgtgttgccttatatgaatatgcagtatgggactttgaaataatgattcataataaaatactaaacgtgtgtcttcaaaaaaaaaaaaaaaaaaaaa

SEQ ID NO: 84 - DNA, 914 bp, Homo sapiens
ggcacgaggccgttccggctgcggctccgctgccggtagcgccgtcccccgggaccacccttcggctggcgccctcccatgctctcggccacccggagggcttgccagctcctcctcctccacagcctctttcccgtcccgaggatgggcaactcggcctcgaacatcgtcagcccccaggaggccttgccgggccggaaggaacagacccctgtagcggccaaacatcatgtcaatggcaacagaacagtcgaacctttcccagagggaacacagatggctgtatttggaatgggatgtttctggggagctgaaaggaaattctgggtcttgaaaggagtgtattcaactcaagttggttttgcaggaggctatacttcaaatcctacttataaagaagtctgctcagaaaaaactggccatgcagaagtcgtccgagtggtgtaccagccagaacacatgagttttgaggaactgctcaaggtcttctgggagaatcacgacccgacccaaggtatgcgccaggggaacgaccatggcactcagtaccgctcggccatctacccgacctctgccaagcaaatggaggcagccctgagctccaaagagaactaccaaaaggttctttcagagcacggcttcggccccatcactaccgacatccgggagggacagactttctactatgcggaagactaccaccagcagtacctgagcaagaaccccaatggctactgcggccttgggggcaccggcgtgtcctgcccagtgggtattaaaaaataattgctccccacatggtgggcctttgaggttccagtaaaaatgctttcaacaaaaaaaaaaaaaaaaaaaaaaaaaaaaaaaaaaaaaaaaaaaaaaaaaaaaaaaaaaaaaaaaaaaaaaaaaaaaaa

SEQ ID NO: 85 - DNA, 596 bp, Homo sapiens
  misc_feature (341): n equals a,t,g, or c
  misc_feature (534): n equals a,t,g, or c
  misc_feature (543): n equals a,t,g, or c
  misc_feature (582): n equals a,t,g, or c
  misc_feature (588): n equals a,t,g, or c
  misc_feature (591): n equals a,t,g, or c
gggcgaaccccatagagaaaaatcccagttgtgtcttgtgaatgagttagtttgtttcagcaagatccagcttgagtataggcttttgtgtgagcaaggtccagctcactgtaaggtaaatattgtccatactgcttgtgcatttataacccacctggaatgttctctattttttatactcttgaaagtggtgctgtaattcaaaatacatgttttcaaactgatgaggttgtcttaaacaaaaactatacttagacaagattatagatttttgaagttgcttcttttttcatccttgccaatgggtcaaagaaaatatgtgttgctttttggaatatttngggttttagtttttttagagtctttctttgccgcctaggctggagtgagtggtgtgatcatgtctcactgcagcctcgacctcccaggcttaagcaatcctcccgccttgcctcctgagtggctgggacctcaggtgcatgccaccacgcccagctaggtttttttttttttaaatctttggggagatgaagnctcctatgntgcccagcttggtttgagttgctggctcaaacaatctgnctgccnagngggaa

SEQ ID NO: 86 - DNA, 2188 bp, Homo sapiens
cggcggctggctcgggcccctacggtcccggcggcggctggaggaggaagccaggcggctggcggaggaggagagacggaggaggccgagaccggagcgccgctcgccgcagacttacttccccggctcagcagggaaaggttcctagaaggtgagcgcggacggtatgcaaagttgtgaatccagtggtgacagtgcggatgaccctctcagtcgcggcctacggagaaggggacagcctcgtgtggtggtgatcggcgccggcttggctggcctggctgcagccaaagcacttcttgagcagggtttcacggatgtcactgtgcttgaggcttccagccacatcggaggccgtgtgcagagtgtgaaacttggacacgccacctttgagctgggagccacctggatccatggctcccatgggaaccctatctatcatctagcagaagccaacggcctcctggaagagacaaccgatggggaacgcagcgtgggccgcatcagcctctattccaagaatggcgtggcctgctaccttaccaaccacggccgcaggatccccaaggacgtggttgaggaattcagcgatttatacaacgaggtctataacttgacccaggagttcttccggcacgataaaccagtcaatgctgaaagtcaaaatagcgtgggggtgttcacccgagaggaggtgcgtaaccgcatcaggaatgaccctgacgacccagaggctaccaagcgcctgaagctcgccatgatccagcagtacctgaaggtggagagctgtgagagcagctcacacagcatggacgaggtgtccctgagcgccttcggggagtggaccgagatccccggcgctcaccacatcatcccctcgggcttcatgcgggttgtggagctgctggcggagggcatccctgccacgtcatccagctagggaaacctgtccgctgcattcactgggaccaggcctcagcccgcccagaggccctgagattgagccccggggtgagggcgaccacaatcacgacactggggagggtggccagggtggagaggagccccgggggggcaggtgggatgaggatgagcagtggtcggtggtggtggagtgcgaggactgtgagctgatcccggcggaccatgtgattgtgaccgtgtcgctaggtgtgctaaagaggcagtacaccagtttcttccggccaggcctgcccacagagaaggtggctgccatccaccgcctgggcattggcaccaccgacaagatctttctggaattcgaggagcccttctggggccctgagtgcaacagcctacagtttgtgtgggaggacgaagcggagagccacaccctcacctacccacctgagctctggtaccgcaagatctgcggctttgatgtcctctacccgcctgagcgctacggccatgtgctgagcggctggatctgcggggaggaggccctcgtcatggagaagtgtgatgacgaggcagtggccgagatctgcacggagatgctgcgtcagttcacagggaaccccaacattccaaaacctcggcgaatcttgcgctcggcctggggcagcaacccttacttccgcggctcctattcatacacgcaggtgggctccagcggggcggatgtggagaagctggccaagcccctgccgtacacrgagagctcaaagacagcgcccatgcaggtgctgttttccggtgaggccacccaccgcaagtactattccaccacccacggtgctctgctgtccggccagcgtgaggctgcccgcctcattgagatgtaccgagacctcttccagcaggggacctgagggctgtcctcgctgctgagaagagccactaactcgtgacctccagcctgccccttgctgccgtgtgctcctgccttcctgatcctctgtagaaaggatttttatcttctgtagagctagccgccctgactgccttcagacctggccctgtagcttttctttttctccaggctgggccgtgagcaggtgggccgttgagttacctctgtgctggatcccgtgcccccacttgcctaccctctgtcctgccttgttattgtaagtgccttcaatactttgcattttgggataataaaaaaggctccctcccctgcccctcagcttctctctggttttytcaaaaaaaaaaaaaaaaa

SEQ ID NO: 87 - DNA, 1380 bp, Homo sapiens
  misc_feature (742): n equals a,t,g, or c
  misc_feature (854): n equals a,t,g, or c
  misc_feature (1132): n equals a,t,g, or c
  misc_feature (1297): n equals a,t,g, or c
  misc_feature (1336): n equals a,t,g, or c
  misc_feature (1351): n equals a,t,g, or c
  misc_feature (1379): n equals a,t,g, or c
gggaaagtttgacgagctggacatgtcccctggggaccccaagtggctggacgtgattgagcgtgacctgcaccggcagttcccattccatgagatgtttgtgtcccgggggggccacggccagcaggacctattccgtgtgctgaaggcctacacgctgtaccggcccgaggagggctactgccaggcccaggcgcccattgccgctgtcttgctcatgcatatgcctgctgagcaagccttctggtgcctggtacagatctgtgagaagtacctgcccggctactacagcgagaaactggaggcgatccagctggacggggagatccttttctcgctgttgcagaaggtgtcgccggtggcccacaagcacctcagccgtcagaagatcgacccgctcctytatatgacagaatggttcatgtgcgccttctcccgaaccttgccctggagctctgtgctgcgtgtytgggacatgttcttctgtgaaggggtcaagatcatcttccgggtggggctggtgctgctgaagcacgcgctgggctcccctgagaaggtcaaagcctgccagggccagtacgagaccatcgagcgactgcggagcctcagccccaagatcatgcaggaggcctttctggtccaggaggtggtggagttgcccgtgacagagcgccagattgagcgcgaacacctcattcagctgcggcgctggcaggagacccggggtgagctgcagtgccgntccccgccaggctgcatggtgccaaggctatcttggatgcagaacctggtccccggctgccctacaaccttaccatccatccgctgcccctagatgcccccctccctggctncaaagccaagcccaagccacccaagcaggcccagaaggagcagcggaaacagatgaaggggagagggcagctggtgctgctgaagcacgcgctgggctcccctgagaaggtcaaagcctgccagggccagtacgagaccatcgagcgactgcggagcctcagccccaagatcatgcaggaggcctttctggtccaggaggtggtggagttgcccgtgacagagcgccagattgagcgcgaacacctcattcagctgcggcgctggcaggagacccggngtgagcttgcagtgccgctccccgcccaggctgcatggtgccaaggctatcttggatgcagaacctggtccccggcctgccctacaaccttcaccatccatccgcctgcccctagatgcccccctccctggctccaaagccaagcccaagccacccaagcagganatgcatgtcccccacagcatgtgcccccgaaggactcancccccaaggactcancccctcaagatttggctccccaggtctna

SEQ ID NO: 88 - DNA, 618 bp, Homo sapiens
  misc_feature (525): n equals a,t,g, or c
  misc_feature (539): n equals a,t,g, or c
  misc_feature (553): n equals a,t,g, or c
aaagctggagctccaccgcggtggcggccgctctagaactagtggatcccccgggctgcaggaattcggcacgaggtgaaagtggggatccttccagatgagagccatcaggccacggttgcccaccgtggtgataaggtagatcaccaggaacaccaggaacaagggcgcctgcagctctagaagatctgtaagtccttggaggacggagttcataatctgtgtcttatccctcggcagtttagcctttgcagatgcatgcacttcatcttctgtgactcccaagatgttcgtacattttttatctwagaatcatatgatatccctggttgggtgcatgatccagttttatatttttgcttccggtgcaaacacaggaagtttcctcctggtagtgatggcctatgactgttatatggccatatgtaaccctttgctttatcctctagtgatgtccaataccttctgcattcaattatcaggtgtttcatttattattgtttttttcatcctataacgcaagtnggtttgttatttcnattaactttctgcnagtccatgttatacattatttctctgtgatattttacacggtttggaatttcctgtactgaacct

SEQ ID NO: 89 - DNA, 530 bp, Homo sapiens
ggcccagatttattcagtggcaatttttcttggtattaatttggccgcatttatcatcatagttttttcctatggaagcatgttttatagtgttcatcaaagtgccataacagcaactgaaatacggaatcaagttaaaaaagagatgatccttgccaaacgttttttctttatagtatttactgatgcattatgctggatacccatttttgtagtgaaatttctttcactgcttcaggtagaaataccaggtaccataacctcttgggtagtgatttttattctgcccattaacagtgctttgaacccaattctctatactctgaccacaagaccatttaaagaaatgattcatcggttttggtataactacagacaaagaaaatctatggacagcawaggtcagaaaacatatgctccatcattcatctgggtggaaatgtggccactgcaggagatgccacctgagttaatgaagccggaccttttcacatacccctgtgaaatgtcactgatttctcaatcaacga

SEQ ID NO: 90 - DNA, 1229 bp, Homo sapiens
aattcggcacgagctgtgtgagcggcacccacagcatggacctggtggccctggcaccctttggggagtataccgtgctgccggggctggactgcaccttttctaagggctatcaaggactcacaaactgcatgatggccgccctgccggaggacactgtagtttttgagaagcctgtgaagaccatccactggaacgggtccttccaggaggcagcctttcccggggagacctttccagtgtcggtagagtgtgaggatggagaccggttcccggcgcaccatgtcatcgtcaccgtgcccttaggttttcttagggaacatttggacaccttctttgaccctcccctgccggctgagaaggcagaagcaatcaggaagataggctttgggaccaacaacaaaatcttcctggagtttgaggagcccttctgggagccagactgccagctgatccagctggtgtgggaggacacgtcgcccctggaggatgctgcccctgagctacaggacgcctggttccggaagctcattggctttgtggtcctgcctgcctttgcgtctgtccacgttctctgtgggttcatgccggacttgagtctgagttcatggagactctgtcggatgaagaagtacttctgtgtctcacccaagtgctccggagagtgacaggaaacccacggctccccgcgcccaagagcgtcctgcggtctcgctggcacagcgccccgtacactagggggtcctacagctacgtggccgtgggcagtactgggggcgacctggacctgctggctcagcccctccctgcagacggcgccggcgcccagctccagatcctgtttgcgggggaagccacacatcgcacgttttactccacgacgcacggggctctgctgtcgggatggagggaggccgaccgcctcctcagtctgtgggccccgcaggtgcagcagcccaggccgaggctctagctgggcccagcctactctgttccacccgtgtcgggggtaggctgggaccgtcatttcttctgacagatttcagtctggcttgaaatttggggatgttaatgagggtcctctggtttttggtaaccagggccaccttctcagttcttgtgtctgttattggagtctggccagggttgacttgagctgagacaccagatgctcacggagatgctggacacataaagcaagttacagccacaaaaaaaaaaaaaaaaaa

SEQ ID NO: 91 - DNA, 481 bp, Homo sapiens
gggtcgcggtcctcggagcgcttctgcagcccgggcaaaggccgggctgygggctctgcagcycttccaggtgggggacttgctgttctcctgcccggcctatgcctacgtgctcacggtcaacgagcggggcaaccactgcgagtactgcttcaccaggraagaaggattgtccaaatgtggaagatgcaagcaggcattttactgcaatgtggagtgtcagaaagaagattggcccatgcacaagctggaatgttctcccatggttgtttttggggaaaactggaatccctcggagactgtaagactaacagcaaggattctggccaaacagaaaatccacccagagagaacaccttcggaaaaattgttagctgtgaaggagtttgaatcacatctggataagttagacaatgagaagaaggatttgattcagagtgacatagctgctctccatcacttttactccaagcatctcgaa

SEQ ID NO: 92 - DNA, 302 bp, Homo sapiens
tcatgcattgcaccctagataacatctcatgagccctaaattgggatttgatgcttttctggatcctgggctctacagatggaatcatttatgctgtgacacattttccttctcctactgtgggtctcgggaaatagcccacttcttctgtgagttacytcctactaatcctctcatgcatgaamatcaatatttgaaaggttattttcattgctctatagtaatgcttgtttccctgttgcatcacatgttcctatgctggagttatctggctgtcatcacatggatctggagaggcggcg

SEQ ID NO: 93 - DNA, 774 bp, Homo sapiens
  misc_feature (688): n equals a,t,g, or c
  misc_feature (696): n equals a,t,g, or c
  misc_feature (714): n equals a,t,g, or c
  misc_feature (720): n equals a,t,g, or c
  misc_feature (741): n equals a,t,g, or c
ggccatcatctccggcatgaacatgagccctgtctccaggctgaagaagacctggggccaaagtgaggacggccaagtttttcatcctcgagcaccagatggacccaacgggaatttctgcaactacaggacagccctgcgcggggcggcccaccgctccctgacggcccacagcagccgagagaagattgtcattcctttcttcagcctgctcatcaaagacatctacttcctgaatgagggctgcgccaaccgccttcccaatggacacgtcaactttgagaaattcctggagctggccaagcaggtgggggagttcatcacctggaaacaagtggagtgtcccttcgagcaagacgccagcatcacccactacctgtacaccgcccccatcttcagtgaggatggtctttatttggcttcttatgaaagtgagagcccagagaaccaaacagaaaaagaaagatggaaagctctaagatcttctattttggggaagacatgaaagcgctgagctgagggacgaggaagagctggagcccgcagaagccgtccacagccctgcctcagtggcccagtgggcagaggccagggagtgcctcactattttgcaaatgccgaccctgtggcctgctgsccgccccccccccccamaagtggccatamgggcacaggagacttttatggncctttggncctggcaggaaccaaggnctcaanacgtgcgggccgggacaatgncttggggggacaatcctggcctttaaggaaccg

SEQ ID NO: 94 - DNA, 1010 bp, Homo sapiens
  misc_feature (995): n equals a,t,g, or c
ggtggaccccagcaaatgtccagcctcggagctgccagagcaccaggccagacttcggaacagctgcgaggagcctccccgtctgaccattcattgcctcttctgcaccagctggttccctgcggagctgggcatcgtgttctcaagctggcgagaagcatgtaaagaacgtggctctgaggtgctgggcccccgactggtgtgcgcctccctcttcctgcggctcctgtgccctgccatcctggcacccagcctctttggtttggcaccagaccatccagcacccggcccagcccgcaccctcacactgattgccaaggtcatccagaacctcgccaaccgtgccccgttcggtgagaaggaggcctacatgggcttcatgaatagcttcctggrggaacatggaccagccatgcaatgcttcctggaccaggtagccatggtggatgtggatgctgcccccagtggttaccagggcagtggtgatctggccctccagttagctgtcctgcatgcccagctctgtacaatttttgctgagcttgaccagacaacccgagacaccctggaaccactgcccaccatcctgcgagccattgaggagggccagcctgtgcttgtgtcagtgccaatgcgtctcccactgcccccggcccaggtccactccagcctctccgcagggagaagcccggcttcctggccccccgggacctccccaagcacacccctctcatctccaagagccagtctctgcgcagtttcgccgctcagagagttgggcccggccacggccggacgaagagcggcccctgcggcggccccggccggtgcagcgcacgcagagtgtcccggtccggcgtcctgcccgccgccgccaatctgcggggccctggccgcgacccaaaggctccctgagcatgggaccagcgccccgsgcccggccttggacccgggamtccgcttcgctgcttcggaagcgtcggtaaccttggcancgccaaattggaaca

SEQ ID NO: 95 - DNA, 733 bp, Homo sapiens
  misc_feature (546): n equals a,t,g, or c
  misc_feature (580): n equals a,t,g, or c
  misc_feature (598): n equals a,t,g, or c
  misc_feature (634): n equals a,t,g, or c
  misc_feature (656): n equals a,t,g, or c
  misc_feature (667): n equals a,t,g, or c
gtcttgccctcatctctctgtctctctgtgtctgtgtctcccccgctcattcccatttgcaggtgcaatgtagcaggacaactcatggagcccccccgggcccatcgagtaccggactggctgaccccctagggttggcagtagcccctgaccctcagtatggccaacactaccggagagcctgaggaggtgagcggcgctctgtccccaccgtccgcatcagcttatgtgaagctggtactgctgggactgattatgtgcgtgagcctggcgggtaacgccatcttgtccctgctggtgctcaaggagcgtgccctgcacaaggctccttactacttcctgctggacctgtgcctggccgatggcatacgctctgccgtctgcttcccctttgtgctggcttctgtgcgccacggctcttcatggaccttcagtgcactcagctgcaagattgtggcctttatggccgtgctcttttgcttccatgcggccttcatgctgttctgcatcagcgtcacccgctacatggccatcgcccaccaccgnttctacgccaagcgcatgacactctggacatgcncggctgcatctgcatggnctggaccctgtctgtggccatggcctttccacctgnctttgacgtgggcacctacagnttattcgggangaggaccagtgcatctttgacatcggtactttaaggccaatgacacctgggcttcatgctaagttg

SEQ ID NO: 96 - DNA, 602 bp, Homo sapiens
ttttttttttttttttttttttttttttgcaatttagggcctttattgaccgaggagggtatggaggtttgagggccagtgagcccaccatagtggagcctgacctcagcaggccactggctggagctggaagtctggggggacactgcccaggccagtgcactgcaggtgaggttgatggtgccagggcgtaccacagggagcaggcagaacctctgtaaggtggccgtaaggaataggaagatacccgagtgggccaggcctgtgcccaggcacatctgctttgccgggtacacaggtgcacagtgagcaccaggtaccccagagccagtccaggctggtccccttcctcctctgcctgcacctgaggcaaagggcatgaaagcatcattgccctggaacttgcccttgtccaggaagttggtagggttgaagcagtctgggtctttgaattgagtggggtcccggtgtgcagtcacaagcaggggaatcacaaaagtgccctggggatacatgcaacttgggttacctgcgggcttggtgagcacctgcaccacctccatccaagacgctttttaaaagcccaagggaataggccgggc

SEQ ID NO: 97 - DNA, 2172 bp, Homo sapiens
ggcacgaggaaacattcaacaatctatccatctccggaggaacttgaagctgttcagaatatggtatctactgttgaatgtgctcttaaacatgtctcagattggttggatgaaacaaataaaggcacaaaaacagagggtgagacagaagtgaagaaagatgaggccggagaaaactattccaaggatcaaggtggtcggacattgtgtggtgtaatgaggattggcctggttgcaaaaggcttgctgattaaagatgatatggacttggagctggttttaatgtgcaaagacaaacccacagagaccctgttaaatacagtcaaagataatcttcctattcagattcagaaactcacagaagagaaatatcaagtggaacaatgtgtaaatgaggcatctattataattcggaatacagaagagcccacgctaactttgaaggtgatacttacctcacctctaattagggacgaattggagaagaaggatggagaaaatgtttcgatgaaagatcctccggacttattggacaggcagaaatgcctgaacgccttggcgtctcttcgacatgccaaatggtttcaggcaagggcaaatggattaaaatcatgtgtaattgtcctccgcattctgcgtgatttgtgcaacagagtccccacatgggcaccattgaaaggatggccactagaacttatatgtgaaaagtctataggtacttgtaatagacctttgggcgctggggaggccttgagacgagtaatggagtgtttggcatctggaatactacttcctgggggtcctggtcttcatgatccttgtgagcgagacccaacagatgctctgagctatatgaccatccagcaaaaagaagatattacccacagtgcacagcatgcactcagactatcagcctttggccagatttacaaagtgctggagatggacccccttccatctagtaagccttttcagaagtattcctggtcagttactgataaagaaggtgctgggtcttcagctctaaagaggccatttgaagatggattaggggatgataaagaccccaacaagaagatgaaacgaaacttaaggaaaattctggatagtaaagcaatagaccttatgaatgcactaatgaggctaaatcagatcaggcctgggcttcagtataagctcctatctcagtctggccccgttcatgccccagtcttcacaatgtctgtagatgtggatggcacaacatatgaagcctcaggaccatccaagaaaacagcaaaacttcacgtagcggtgaaggtattgcaggcaatgggatatccaacaggctttgatgcagatattgaatgtatgagttccgatgaaaaatcagataatgaaagtaaaaatgaaacagtgtcttcaaactcaagcaataatactggaaattctacaactgaaacctccagtaccttagaggtaagaactcagggccctatcctcacagcaagtggcaaaaaccctgtaatggagctcaatgaaaaaagaagaggtctcaagtatgaactcatctcagagactggtggaagccatgacaagcgctttgtaatggaggtagaagtagatggacagaaattcagaggcgcaggtccaaataagaaagtggcaaaggcgagtgcagctttagctgccttggagaaactgttttctggacccaatgcggcaaataataagaaaaagaagattatccctcaggcaaagggcgttgtgaatacagctgtgtctgcagcagtccaagctgttcggggcagaggaagaggaactctaacaaggggagcttttgttggggcgacagctgctcctggctacatagctccaggctatggaacaccatatggttacagcacagctgcccctgcctatggtttacccaagagaatggttctgttacccgttatgaaatttccaacatatcctgttccccactactcattcttttagcaaatgacagaagctaattcctattgaacaacaatacagtacaacacagaatgttagagaaaaagcctttttatcctgctttctttgaacacatacttgatcaaaattatttgtaaagaacatctttcctactttttgattttaacaaatgcaaatttagttctctaaaacttgaaaaaaaaaaaaaaaaaa

SEQ ID NO: 98 - DNA, 821 bp, Homo sapiens
  misc_feature (58): n equals a,t,g, or c
  misc_feature (109): n equals a,t,g, or c
  misc_feature (325): n equals a,t,g, or c
  misc_feature (765): n equals a,t,g, or c
  misc_feature (769): n equals a,t,g, or c
  misc_feature (773): n equals a,t,g, or c
  misc_feature (808): n equals a,t,g, or c
caattatgtcacaccacagaagtaaggttccttcacaaagatcccaagctagcagatntcccagtcacgaacgttgtaaaacgacgggccagtgcctagcttataatangactcactatagggagagagctatgacgtcgcatgcacgcgtaarcttgggcccctcgagggatcctactagagcggccgccctttttttttttttttgagtttcagaataatgcagatgttttatttgaggggaaagcatcattcatatgtatccaagcaaaaggcagagcagttttacctttaaatgctaaaagtactggttggctctgtaggnccctcagaatcaaaaggaaactcctccacactttgtctctgtcttctccaggacccatatttcttggccactttcataacgtagtttttgaaagatgctcccataaaaacataaaggattgggttgaggcagctgtgaaagagtgcgatgctttctgtgacttggatggcgatgtccatgcgtttgctcatgttgcagctggtgatcagggagtagatgatgtctatggctcggcagaacttgacaatgttataaggcagttgagtgacaatgaaaactataacgactgtgagcagaacttttaggggkcgagatattttaatgtttggcatcttcatgagtgtcctttctgtgataaagtagcacacccccataataagaaaggggactacaaatccaatgcagatctctagcattgaatcaatgctttcattgatgtnccangtancgggggaaatgggatgacctagcattgtcattacnggataaaaccact

SEQ ID NO: 99 - DNA, 362 bp, Homo sapiens
gagcatggtgaatttgagaagaatttgtatggaactagcatagattctgtacggcaagtgatcaactctggcaaaatatgtcttttaagtcttcgtacacagtcattgaagactctccggaattcagatttgaaaccatatattatcttcattgcacccccttcacaagaaagacttcgggcattattggccaaagaaggcaagaatccaaagcctgaagagttgagagaaatcattgagaagacaagagagatggagcagaacaatggccactactttgatacggcaattgtgaattccgatcttgataaagcctatcaggaattgcttaggttaattaacaaacttgatactgaacctca

SEQ ID NO: 100 - DNA, 3220 bp, Homo sapiens
ccatcttcctgtgtacctatagagccttcaccaccacccaacaggtcctggacctgctgttcaaaaggtacggtagatgtgacgccctcacggcctcctctagatacggctgcatcctcccctattccgacgaggatggtggaccccaggaccaacttaaaaatgccatctcctccatcctgggcacctggctggaccagtactcggaggatttctgtcaacctccggactttccctgcctcaagcagctggtggcctacgtgcagctcaacatgccaggctcagacctggagcgccgtgcccaccttctcctggcccagctggagcactcggaacccattgaggcagarcctgaggctctgtcaccagtgccagctctaaaaccaactccagagctcgagctagctctaacaccagctcgagcacccagcccagtgccggctccagccccggagccagagccagctccaacaccagctccaggttcagagctagaagtagctccagcaccagctccggagctccagcaggctccagagccagctgtgggactagaatcggctccagcgccagctctggaactagagccagctccagaacaggatccagctccctcacaaactctagagctggagccagctccagcrccagttccatcattacagccttcctggccttcacctgtggttgcagagaacgggctgagtgaggagaagcctcacctcttggtgttccctccagatctggtggcagagcagtttacactgatggatgcggaactgttcaagaaggtggtgccctaccactgcctgggctccatctggtcccagcgggacaagaagggcaaggagcacctggcgcccaccatccgcgccactgtcacccagttcaacagtgtggccaactgtgtcatcaccacctgcctcgggaaccgaagcacgaaagccccagacagggccagggtggtggagcactggatcgaggtggccagggagtgccggatcctcaagaacttctcgtcactgtatgccatcctctctgccctgcagagcaactccatccaccgtctgaagaagacgtgggaagacgtttccagggacagtttccggatctttcagaagctgtcagagatcttctcagatgagaacaactactcattgagccgggagctgctcatcaaggagggcacctccaagtttgccaccctggagatgaaccccaagagagcccagaaacggccgaaggagacgggcatcatccagggcaccgttccctacctgggcacgttcctcaccgacctggtgatgctggacactgccatgaaggactatctgtatggcagactcatcaactttgagaagaggaggaaggagttcgaggtgatcgcccagatcaagctgctgcagtcggcctgcaacaactacagcatcgcgccagatgagcaatttggggcctggttccgggccgtggagcggctcagcgagactgagagctacaacctgtcgtgcgagctggagcccccatccgagtcagccagcaacaccctcaggaccaagaagaacacagccattgtcaagcgctggagcgaccgccaggcccccagcactgagctcagtaccagtggcagctcccactccaagtcctgtgaccagctcaggtgtggcccctacctcagcagcggggacatcgctgacgcgctcagcgtgcactcggccggctcctctagctccgacgtggaggagatcaacatcagcttcgtcccggagtctcctgatggccaggaaaagaagttctgggaatcagcctcacagtcatccccggagacctccggcatcagctcagcctccagcagcacctcgtcctcctcagcctccaccacgcccgtggctgccacacgcacccacaagcgctctgtctcagggctctgcaactccagctccgcgctgccgctctacaaccagcaggtgggcgactgctgtatcatccgcgtcasctggacgtggacaatggcaacatgtacaagagcatcctggtgaccagccaagataaggctccggctgtaatccgcaaggccatggacaaacacaacctggaggaggaggagccggaggactatgagctgctgcagattctctcagatgaccggaagctgaagatccctgaaaacgccaacgtcttctatgccatgaactctacygccaactatgactttgtcctsaagaagcggaccttcaccaagggagtgaaggtcaagcacggagccagctccaccctccctcgcatgaagcagaaaggactcaagattgccaagggcatcttctgagggcatcctcccagggtctggctggctggtagccaagcacttatggaccagagtggcccaggccagctgggcgccttcctcccacctgccagcccagggtaccccagactccagtttcatcctgaacctctcccgctgctgggattgacgcctgccattggtcaggctgacctggcctcccgtggaccactcgctgccttaggtgccttctgctctctggaaccagaggactagctgacttttgccaaggagcagtgccaacgggcatggcatggtgccctgcctgcccccgggcrccacctctgtacacttccctgacaccttcccaggtgtgggtcactgccacctgtgcccatgggcaccccagagcacccactgtgaccactgcagttctctcatgcccacaggcactggcctgtgaccttcgcaggggtcccggcccctcccaccactctagcctttctcaggctgcaccaaagattccatcatcagggccaactgagagtgagggagtctcacccaccgcttaccccagccctcccctgggagcagagagagaaaccctcttcatggaccagactctgcacccggtgagtgaggacagtcccagctgagtcccatcgatgttgaatctcatgccactgcaagtgccattcaccactgcgtcctgggctttacgagaccatgcaagacgggggttagtgaggaaggaggatttggggtgggggtggggtgattgaatatttgtataaaaagcaaaaagaaaaaaaaaatgtttgtttactgattggggaggggcaatatttatttgttgtaaatagcaaatgctagacttgaatattatattaaaatcctgtttctactataaaaaaaaaaaaaaaaaaaaaaaaaaaaaaa

SEQ ID NO: 101 - DNA, 779 bp, Homo sapiens
  misc_feature (719): n equals a,t,g, or c
  misc_feature (755): n equals a,t,g, or c
  misc_feature (762): n equals a,t,g, or c
  misc_feature (770): n equals a,t,g, or c
ggacatccggaactgtaagagcaaagaggcggaaattaagagaatcaacaaggaactggccaacatccgctccaagttcaaaggagacaaagccttggatggctacagtaagaaaaaatatgtgtgtaaactgcttttcatcttcctgcttggccatgacattgactttgggcacatggaggctgtgaatctgttgagttccaataaatacacagagaagcaaataggttacctgttcatttctgtgctggtgaactcgaactcggagctgatccgcctcatcaacaacgccatcaagaatgacctggccagccgcaaccccaccttcatgtgcctggccctgcactgcatcgccaacgtgggcagccgggagatgggcgaggcctttgccgctgacatcccccgcatcctggtggccggggacagcatggacagtgtcaagcagagtgcggccctgtgcctccttcgactgtacaaggcctcgcctgacctggtgcccatgggcgagtggacggcgcgtgtggtacacctgctcaatgaccagcacatgggtgtggtcacggccgccgtcagcctcatcacctgtctctgcaagaagaacccagatgacttcaagacgtgcgtctctctggctgtgtcgcgcctgaaccggatcgtctcctctgctccaccgacctcaggactacacctactacttcgcccagcaccctgctctcggngaactcctgcggtgctgcatgctacccgcttcagangatgcgnttgtgaangggcggtgg

SEQ ID NO: 102 - DNA, 745 bp, Homo sapiens
  misc_feature (586): n equals a,t,g, or c
  misc_feature (689): n equals a,t,g, or c
  misc_feature (726): n equals a,t,g, or c
  misc_feature (728): n equals a,t,g, or c
  misc_feature (729): n equals a,t,g, or c
gtccagaaaaaagtggatcatgaattggatgacgtgtttggaaagtctgaccgtcccgctacagtagaagacctgaagaacttcgtattctggaatgtgtattaaaggagacctttcgcctttttcctctgtttcctttatttgcccgtagtgttagtgaagattgtgaagtggcaggttacagagttctaaaaggcactgaagccgtcatcattccctatgcattgcacagagatccgagatacttccccaaccccgaggagttccagcctgagcggttcttccccgagaatgcacaagggcgccatccatatgcctacgtgcccttctctgctggccccaggaactgtataggtcaaaagtttgctgtgatggaagaaaagaccattctttcgtgcatcctgaggcacttttggatagaatccaaccagaaaagagaagagcttggtctagaaggacagttgattcttcgtccaagtaatggcatctggatcaagttgaagaggagaaatgcagatgaacgctaactatattattgggttgtgcctttatcatgagaaaggtctttattttaagagatccttgncatttacaatttacagatcatgagttcaatatgcttgaatcccctagacctaatttttccttgatcccactgatcttgacatcaagtctaacaaagaaaaagntttgagttttggattttcttttttcttttttctttantnnttttttttgaaaccgg

SEQ ID NO: 103 - DNA, 2356 bp, Homo sapiens
  misc_feature (506): n equals a,t,g, or c
gacgaagcgtgcgcgctttggtaaccggctagaaatcccgcacgcgcgcctgcctcctctccccaggcctgagctgcccctcccactgcctttccttcttcccgcgagtcagaagcttcgcgagggcccagagaggcggtggggtgggcgaccctacgccagctccgggcgggagaaagcccaccctctcccgcgccccaggaaaccgccggcgttcggcgctgcgcagagccatggaattctcctggctggagacgcgctgggcgcggcccttttacctggcgttcgtgttctgcctggccctggggctgctgcaggccattaagctgtacctgcggaggcagcggctgctgcgggacctgcgccccttcccagcgccccccacccactggttccttgggcaccagaagtttattcaggatgataacatggagaagcttgaggaaattattgaaaaataccctcgtgccttccctttctggattgggccctttcaggcatttttntgtatctatgacccagactatgcaaagacacttctgagcagaacagatcccaagtcccagtacctgcagaaattctcacctccacttcttggaaaaggactagcggctctagacggacccaagtggttccagcatcgtcgcctactaactcctggattccattttaacatcctgaaagcatacattgaggtgatggctcattctgtgaaaatgatgctggataagtgggagaagatttgcagcactcaggacacaagcgtggaggtctatgagcacatcaactcgatgtctctggatataatcatgaaatgcgctttcagcaaggagaccaactgccagacaaacagcacccatgatccttatgcaaaagccatattgaactcagcaaawtcatatttcaccgcttgtacagtttgttgtatcacagtgacataattttcaaactcagccctcagggtraccgcttccagaagttaagccgagtgttgaatcagtacacagatacaataatccaggaaagaaagaaatccctccaggctggggtaaagcaggataacactccgaagaggaagtaccaggattttytggatattgtcctttctgccaaggatgaaagtggtagcagcttctcagatattgatgtacactctgaagtgagcacattcctgttggcaggacatgacaccttggcagcaagcatctcctggatcctttactgcctggctctgaaccctgagcatcaagagagatgccgggaggaggtcaggggcatcctgggggatgggtcttctatcacttgggaccagctgggtgagatgtcgtacaccacaatgtgcatcaaggagacgtgccgattgattcctgcagtcccgtccatttccagagatctcagcaagccacttaccttcccagatggatgcacattgcctgcagggatcaccgtggttcttagtatttggggtyttcaccacaaccctgctgtctggaaaaacccaaaggtctttgaccccttgaggttctctcaggagaattctgatcagagacacccctatgcctacttaccattctcagctggatcaaggaactgcattgggcaggagtttgccatgattgagttaaaggtaaccattgccttgattctgctccacttcagagtgactccagaccccaccaggcctcttactttcccaaccattttatcctcaagccmaagaatgggatgkatttgcacctgaagaaactctctgaatgktagatctcagggtacaatgattaaacgtactttgtttttcgaagttaaatttacagctaatgatccaagcagatagaaagggatcaatgtatggtgggaggattggaggttggtgggataggggtctctgtgaagagatccaaaatcatttctaggtacacagtgtgtcagctagatctgtttctatataactttgggagattttcagatcttttctgttaaactttcactactattaatgctgtatacaccaatagactttcatatattttctgttgtttttaaaatagttttcagaattatgcaagtaataagtgcatgtatgctcactgtcaaaaattcccaacactagaaaatcatgtagaataaaaattttaaatctcacttcacttagccgacattccatgccctgaccaatcctactgcttttcctaaaaacagaataatttggtgtgcattctttcagactttttcctatacattttatatgtagaaatgtagcaatgtatttgtatagatgtgatcattcctatattgttattgatttttttcacttaataaaaattcaccttattccttaaaaaaaaaaaaaaaaggg

SEQ ID NO: 104 - DNA, 406 bp, Homo sapiens
gtgaaagcagaaatgcaaaagcacggagaagaccccttctgccctttctccatcatcagcaatgccgtctctaacatcatttgctccttgtgctttggccagcgctttgattacactaatagtgagtycaagaaaatgcttggttttatgtcacgaggcctagaaatctgtctgaacagtcaagtcctcctggtcaacatatgcccttggctttattaccttccctttggaccatttaaggaattaagacaattgaaaaggatataaccagtttccttaaaaaaatcatcaaagaccatcaagagtctctggatagagagaaccctcagggacttcataggacatgtaccttytccacatgggaagaggagagggaaaaataatagtgaacaggcagttttggatg

SEQ ID NO: 105 - DNA, 737 bp, Homo sapiens
  misc_feature (1): n equals a,t,g, or c
  misc_feature (4): n equals a,t,g, or c
  misc_feature (5): n equals a,t,g, or c
  misc_feature (6): n equals a,t,g, or c
nttnnnatgmatcgccggctcgaaataaccctactaaagggaacaaaagctggagctccaccgcggtggcggccgctctagaactagtggatcccccgggctgcaggaattcggcacgagcaactcatggagcccccccgggcccatcgagtaccggactggctgaccccctagggttggcagtagcccctgaccctcagtatggccaacactaccggagagcctgaggaggtgagcggcgctctgtccccaccgtccgcatcagcttatgtgaagctggtactgctgggactgattatgtgcgtgagcctggcgggtaacgccatcttgtccctgctggtgctcaaggagcgtgccctgcacaaggctccttactacttcctgctggacctgtgcctggccgatggcatacgctctgccgtctgcttcccctttgtgctggcttctgtgcgccacggctcttcatggaccttcagtgcactcagctgcaagattgtggcctttatggccgtgctcttttgcttccatgcggccttcatgctgttctgcatcagcgtcacccgctacatggccatcgcccaccaccgcttctacgccaagcgcatgacactctggacatgcgcggctgtcatctgcatggcctggaccctgtctgtggccatggccttcccacctgtctttgacgtgggcacctycaagtttattcgggaggaggacaagtgcatctttgagcatcc

SEQ ID NO: 106 - DNA, 1884 bp, Homo sapiens
  misc_feature (1855): n equals a,t,g, or c
gaaatcagcctcttgccccattgctctttgcaggggtagaagaaggaagtgtagcggggtaaggaatgcaccgtcaggtctctcacaaccctttcccagctctcctccccaacaaacagtacctgggatggagccctagggtaatcgcagccacgggatgggtcgaggtgacaggcttcagggaccacacttcggcctttgcccgaccttccacaacttaagcgaagagaggccaccagccgtaacagggcgttaaagcccaggggaagattggtccttatgacttcctgccttccagccctcagattcatcgctaccccgaggctaagcgccatgcctcatattgacaacgatgtgaaactggacttcaaggatgtccttttgaggcccaaacgcagtacccttaagtctcgaagtgaggtggatctcacaagatccttttcatttcggaactcaaagcagacatactctggggttcccatcattgctgccaatatggatactgtgggcacctttgagatggccaaggttctctgtaagttctctctcttcactgctgtccataagcactatagcctcgttcagtggcaagagtttgctggccagaatcctgactgtcttgagcatctggctgccagctcaggcacaggctcttctgactttgagcagctggaacagatcctggaagctattccccaggtgaagtatatatgcctggatgtggcaaatggctactctgaacactttgttgaatttgtaaaagatgtacggaagcgcttcccccagcacaccatcatggcagggaatgtggtaacaggagagatggtagaagagctcatcctttctggggctgacatcatcaaagtgggaattgggccaggctctgtgtgtactactcggaagaaaactggagtggggtatccacagctcagcgcagtgatggagtgtgcagatgctgctcatggcctcaaaggcacatcatttcagatggaggttgcagctgtcctggggatgtggccaaggcttttggggcaggagctgacttcgtgatgctgggtggcatgctggctgggcacagtgagtcaggtggtgagctcatcgagagggatggcaagaagtacaagctcttctatggaatgagttctgaaatggccatgaagaagtatgctgggggcgtggctgagtacagagcctcagagggaaagacagtggaagttccttttaaaggagatgtggaacataccatccgagacatcctaggagggatccgctctacgtgtacctatgtgggagcagctaagctcaaagagttgagcaggagaactaccttcatccgagtcacccagcaggtgaatccaatcttcagtgaggcgtgctagacctgagcagttctaccctcccaaggcaccagtactctaccatggggcatcccaagtggggtcctcacccatcccagctactgcagctctgtattactttgtcatttcctgttgtctcactcctgagggctcctgcagtaactctgtacttctctatctgcacacacaaaatkcccaaggcactcactggggaggaagcaaggaagcaaacagtctgagaaaatgatgcaagaaaatcaaatgggaatctggggacccaacacaacatcctgaagattattaaaaggaaaagatgctgattggtacataaatcttttacatggccttggtctagaggaggcaggcttttagaatcatgttttgttaatccgcttcactaaattggaccttcacatatctaaaaagctctgaagtgtttgtatatttgaaatacctcaataaagagagagctcattgactgtaaaaaaaaaaaaaanagggcggccgctttaaaggtccaagttta

SEQ ID NO: 107 - DNA, 596 bp, Homo sapiens
  misc_feature (9): n equals a,t,g, or c
  misc_feature (19): n equals a,t,g, or c
  misc_feature (28): n equals a,t,g, or c
agcgtgccncggcgacggnggggcggcnmcamwrgkgaacammmktcyggagctcgcgcgcctgcaggtckacactagtggatccaaagaattcggcacgagcagaatgggagtgaatgwcttgtggcaaattttggagcctgttaagcaacacatccccttgcgtaatcttggtgggaaaaccattgcagttgatctgagtctctgggtgtgtgaggcacagacagtcaaaaaaatgatgggcagcgtcatgaagccccacctcaggaacttattttttcgtatctcatatttaacacaaatggatgtaaaactggtatttgttatggaaggggaaccaccaaagctgaaagctgatgtcataagcaagaggaatcagactcggtatgggtcttctggaaaatcgtggtctccagaaaacagggaratcacattttaaatcmgtcttaagagagtgcctccatatgctcgaatgcttaggaatcccctgggttcaggctgctggggaagctgaagccatgtgtgcttatctcagtgctggtggtcatgtcgatggctgcctcaccaatgatggagatactttcctttatggggcc

SEQ ID NO: 108 - DNA, 1268 bp, Homo sapiens
gcacgagtgctgccatcgcagttcatgggaggaagcgggaggagcgacctcagcatcctgtcagctgtgaagtcatcaaagccattgctgataccctctccattcctgtcatagccaacggaggatctcatgaccacatccaacagtattcggacatagaggactttcgacaagccacggcagcctcttccgtgatggtggcccgagcagccatgtggaacccatctatcttcctcaaggagggtctgcggcccctggaggaggtcatgcagaaatacatcagatactatgacaaccactacaccaacaccaagtactgcttgtgccagatgctacgagaacagctggagtcgccccagggaaggttgctccatgctgcccagtcttcccgggaaatttgtgaggcctttggccttggtgccttctatgaggagaccacacaggagctggatgcccagcaggccaggctctcagccaagacttcagagcagacaggggagccagctgaagatacctctggtgtcattaagatggctgtcaagtttgaccggagagcatacccagcccagatcacccctaagatgtgcctactagagtggtgccggagggagaagttggcacagcctgtgtatgaaacggttcaacgccctctagatcgcctgttctcctctattgtcaccgttgctgaacaaaagtatcagtctaccttgtgggacaagtccaagaaactggcggagcaggctgcagccatcgtctgtctgcggagccagggcctccctgagggtcggctgggtgaggagagcccttccttgcacaagcgaaagagggaggctcctgaccaagaccctgggggccccagagctcaggagctagcacaacctggggatctgtgcaagaagccctttgtggccttgggaagtggtgaagaaagccccctggaaggctggtgactactcttcctgccttagtcacccctccatgggcctggtgctaaggtggctgtggatgccacagcatgaaccagatgccgttgaacagtttgctggtcttgcctggcagaagttagatgtcctggcaggggccatcagcctagagcatggaccaggggccgcccaggggtggatcctggcccctttggtggatctgagtgacagggtcaagttctctttgaaaacaggagcttttcaggtggtaactccccaacctgacattggtactgtgcaataaagacaccccctaccctcacaaaaaaaaaaaaaaaaaaaaaa

SEQ ID NO: 109 - DNA, 432 bp, Homo sapiens
acgccgattgccgtgcgtcgcggcttttcccggtgacgacgaagaggcgcaggcggattattatggcggaaatcccctcactgctgggtaatgtcaccgtgatcaacgkttacttcccgcagtgaaagccgcgaccatccgataaaattcccggcaaaagcgcattttatcagaatctgcaaaactacctggaaaccgaactcaaacgtgataatccggtactgattatgggcgatatgaatatcagccctacagatctggatatcggcattggcgaagaaaaccgtaarcgctggctgcgtaccggtaaatgctctttcctgccggaagagcgcgaatggatggacaggctgatgagctgggggttggtcgataccttccgccatgcgaatccgcaaacagcagatcgtttctcatgggttgattaccgcc

SEQ ID NO: 110 - DNA, 751 bp, Homo sapiens
  misc_feature (1): n equals a,t,g, or c
  misc_feature (7): n equals a,t,g, or c
  misc_feature (10): n equals a,t,g, or c
  misc_feature (17): n equals a,t,g, or c
  misc_feature (19): n equals a,t,g, or c
ngaggtntancgccccntncgtatgcccctccgggattaaagctggagctccccgcggtggcggccgctctagaactagtggatcccccgggctgcagggaaaaagaaaaaaagaaaaaaatcagcaatttatagaaagaagctatagtctgtcgggatatccaacaccaacagatattctgatggcaaaacaagtggaagaaaagaggaagcatgactgcagatcagatcagttctctttgtggattatattttcagtaaaatgtatggatctatcttttccttgttcttatatctagatcatgagacttgactgaggctgtatccttatcctccatccatctatggcgaactatagccatgcagctgacaacattttgcaaaatctctcgcctctaacagcctttctgaaactgacttccttgggtttcataataggagtcagcgtggtgggcaacctcctgatctccattttgctagtgaaagataagaccttgcatagagcaccttactacttcctgttggatctttgctgttcagatatcctcagatctgcaatttgkttcccatttgkgktcaactctgtcaaaaatggctctacctggacttatgggactctgacttgcaaagtgawtgcctttctgggggktttgkcctgkttccacactgctttcatgctcttctgcatcagkgtcaccagatacttratwtcgcccatyaccgcttctatacaaagaggctgrcctttaaa

SEQ ID NO: 111 - DNA, 910 bp, Homo sapiens
tcccggtcgacccacgacgtccgcccgcccgccccgccgctcctcctccctgtaacatgccatagtgcgcctgcgaccacacggccggggcgctagcgttcgccttcagccaccatggggaatgggatgaacaagatcctgcccggcctgtacatcggcaacttcaaagatgccagagacgcggaacaattgagcaagaacaaggtgacacatattctgtctgtccacgatagtgccaggcctatgttggagggagttaaatacctgtgcatcccagcagcggattcaccatctcaaaacctgacaagacatttcaaagaaagtattaaattcattcacgagtgccggctccgcggtgagagctgccttgtacactgcctggccggggtctccaggagcgtgacactggtgatcgcatacatcatgaccgtcactgactttggctgggaggatgccctgcacaccgtgcgtgctgggagatcctgtgccaaccccaacgtgggcttccagagacagctccaggagtttgagaagcatgaggtccatcagtatcggcagtggctgaaggaagaatatggagagagccctttgcaggatgcagaagaagccaaaaacattctggccgctccgggaattctgaagttctgggcctttctcagaagactgtaatgtacctgaagtttctgaaatattgcaaacccacagagtttaggctggtgctgccaaaaagaaaagcaacatagagtttaagtatccagtagtgatttgtaaacttgtttttcatttgaagctgaatatatacgtagtcatgtttatgttgagaactaaggatattctttagcaagagaaaatattttccccttatccccactgctgtggaggtttctgtacctcgcttggatgcctgtaa

SEQ ID NO: 112 - DNA, 1031 bp, Homo sapiens
ggcacgagtcctcatacaacccggagtaggcgagaccaagaagtagccggtagagattaccactttgtttcgcggcaagcattcgaggcagacatagcagctggaaagttcattgagcatggtgaatttgagaagaatttgtatggaactagcatagattctgtacggcaagtgatcaactctggcaaaatatgtcttttaagtcttcgtacacagtcattgaagactctccggaattcagatttgaaaccatatattatcttcattgcaccccccttcacaagaaagacttcgggcattattggccaaagaaggcaagaatccaaagcctgaagagttgagagaaatcattgagaaagacaagagagatggagcagaacaatggccactactttgatacggcaattgtgaattccgatcttgataaagcctatcaggaattgcttaggttaattaacaaacttgatactgaacctcagtgggtaccatccacttggctgaggtgaaagaaacatccattctgtggcatgttggacttgatctggcaaaaactgccaataggaggactgcccgacactgcagcaagattgaggataagatggaaggcagcagtataagctgtagatctgttcttagatctcttgaattagtgagacgacagttcccttaggcagtttgtgcatggcatcctttattctctatacatggctttagcggttcttgcctcattttgggattctaaatggaagctttcaacagagcattccattttgtcctgttaaaaccttttgttttcacctaaaccctttctgcttagttgtatctctgtgaaaaacttgtatacacaagcgtccatgtctcacacaaatattgatgtgattattcttaagtgttaaatcattaacacttaaatgacttcattgggaatattgagcagagggactgtgcttctatgcactgggcaaggcagtatttgcttaggaaactaatgtagtcatcagagatactttcctaaaaaaaaaaaaaaaaaa

SEQ ID NO: 113 - DNA, 916 bp, Homo sapiens
  misc_feature (894): n equals a,t,g, or c
gaaccgcatctgtgtgctggacgtggacctgcagggtgtgcggaacatcaaggccaccgatctgcggcccatctacatctctgtgcagccgccttcactgcacgtgctggtgtgtgctgggcagggttgggggctgggggccagggcatgccaggctctgattgccaccccctttttaggagcagcggctgcggcaggcaacactgaaaccgaggagagcctggtgaagcggctggctgctgcccaggccgacatggagagcagtgagtgtgccgtgggatcaccagggaatgccaggaggggagtcagggttctgaggtctgtggcaccagggaccctgtgggtccccagacctcctgacacctggagtccctgtgagggtcctcagacctctcaactacctcccaacacctagagtccccgtgarggtccccagaacccacccccagtcaccaagggtctcattgagggtcctcagatttccctctgttacccagagtctccgtgagggcccccagaccccccatcgcccagggtcccatgagatgtccccaacyttytagccccggsggtgtcatgtgcatcctyttacagytgttgcctyttctctgggtctgactgcagcccacaagaagagggcatttaatgttctgctgtgtgtgtagaggatagtgtagcccctaaccagagtcctgatgggtgctggtgtccagacccaagttctggggctccagagagagcaggagtggtgcctgaggactgaggcccagggggcggcccttccctaccctgcacaggcccggctgggctggaaagctgtcccacagccgcagtgaggacagccgcaggccagtgggctgctctgggggtcgtgtgggacctggggtggggctncatgggctcactgtgcccttga

SEQ ID NO: 114 - DNA, 1830 bp, Homo sapiens
ccacgcgtccgatccgccgcaccgctgggggccaacgttgtcggaccgaggagtccgaggtggcgactgagtgagatacccagctgtgcggagctaggacgcggaacatcccagaggccagcatcaacatgtttccatccttggggaatgaccacgcaactgggcccagccctggtgctgggggtggccctgtgcctgggttgtggccagcccctaccacaggtccctgaacgccccttctctgtgctgtggaatgtaccctcagcacactgtgaggcccgctttggtgtgcacctgccactcaatgctctgggcatcatagccaaccgtggccagcattttcacggtcagaacatgaccattttctacaagaaccaactcggcctctatccctactttggacccaggggcacagctcacaatgggggcatcccccaggctttgccccttgaccgccacctggcactggctgcctaccagatccaccacagcctgagacctggctttgctggcccagcagtgctggattgggaggagtggtgtccactctgggctgggaactggggccgccgccgagcttatcaggcagcctcttgggcttgggcacagcaggtattccctgacctggaccctcaggagcagctctacaaggcctatactggctttgagcaggcggcccgtgcactgatggaggatacgctgcgggtggcccaggcactacggccccatggactctggggcttctatcactacccagcctgtggcaatggctggcatagtatggcttccaactataccggccgctgccatgcagccacccttgcccgcaacactcaactgcattggctctgggccgcctccagtgccctcttccccagcatctacctcccacccaggctgccacctgcccaccaccaggcctttgtccgacatcgcctggaggaggccttccgtgtggcccttgttgggcaccgacatcccctgcctgtcctggcctatgtccgcctcacacaccggagatctgggaggttcctgtcccaggatgaccttgtgcagtccattggtgtgagtgcagcactaggggcagccggcgtggtgctctggggggacctgagcctctccagctctgaggaggagtgctggcatctccatgactacctggtggacaccttgggcccctatgtgatcaatgtgaccagggcagcgatggcctgcagtcaccagcggtgccatggccacgggcgctgtgcccggcgagatccaggacagatggaagcctttctacacctgtggccagacggcagccttggagattggaagtccttcagctgccactgttactggggctgggctggccccacctgccaggagcccaggcctgggcctaaagaagcagtataaagccagggcccctgccactgcctcttcttttccctgctgccacttttccagtcctggaactactctgtcccactcttgctctattcagtttacagtcaaccctcccaagcacacaccccgcttcccttggaatccctgaggggtagaaggggccagaaaaaacgcttataaaaccagaggccctctgagatcatgtgagtcctccatggcaaggaagcagttccagggagagtcaggttccagctagttagggctgccagcctagggctttgtgcctacacctcactaagcccatggagaggtcacagatgggccgtgcacgggcagatgggccccaaaaaatcttggcgaaggtcggtaaagtgctaagctgttgtctgcactctttcatcataaagtcacttttttccactgaaaaaaaaaaaaaaa

SEQ ID NO: 115 - DNA, 715 bp, Homo sapiens
cagggatggcaagatcttttagcatttaggggatgcctttgttagtaaccgttcacaatgggcagctcccggctgagggtctttgaccctcatttggagaggaaagattccgccgcggcgctctcagaccgagagctgcccttgcctaccttcgatgtgccttatttcaaatacatcgacgaggaggatgaggacgatgaatggagcagccgctcgcagtcttccaccgaggatgactcagtggactctctgctctctgacagatatgtggtggtgtccgggaccccggagaagattttggagcaccttttgaatgacttgcacctggaagaagtccaggacaaagaaacagagaccctcctggatgacttccttctcacgtacactgtcttcatgacaactgatgacttgtgccaggctctgttaaggcactattctgctaagaagtatcaaggcaaagaggaaaactcagatgttccgcgtaggaaacgtaaagtcttgcatcttgtttcccagtggattgctctgtacaaagactggttacctgaagatgaacattcaaaaatgtttttaaagaccatatataggaatgtactggatgaaggttatgaatatccaatacttgaaaaagaattgaaagaatttcaaaagatacttggaatggaccggcggcacactggaaatgaatattcaccacaaaaaaaaaaaaaaaaaa

SEQ ID NO: 116 - DNA, 1407 bp, Homo sapiens
ggcacgagctgggagctaggtcctcggagtgggccrgagatggcggcggccgacggggctttgccggaggcggcggctttagagcaacccgcggagctgcctgcctcggtgcgggcgagtatcgagcggaagcggcagcgggcactgatgctgcgccaggcccggctggctgcccggccctactcggcgacggcggctgcggctactggaggcatggctaatgtaaaagcagccccaaagataattgacacaggaggaggcttcattttagaagaggaagaagaagaagaacagaaaattggaaaagttgttcatcaaccaggacctgttatggaatttgattatgtaatatgcgaagaatgtgggaaagaatttatggattcttatcttatgaaccactttgatttgccaacttgtgataactgcagagatgctgatgataaacacaagcttataaccaaaacagaggcaaaacaagaatatcttctgaaagactgtgatttagaaaaaagagagccacctcttaaatttattgtgaagaagaatccacatcattcacaatggggtgatatgaaactctacttaaagttacagattgtgaagaggtctcttgaagtttggggtagtcaagaagcattagaagaagcaaaggaagtccgacaggaaaaccgagaaaaaatgaaacagaagaaatttgataaaaaagtaaaagaattgcggcgagcagtaagaagcagcgtgtggaaaagggagacgattgttcatcaacatgagtatggaccagaagaaaacctagaagatgacatgtaccgtaagacttgtactatgtgtggccatgaactgacatatgaaaaaatgtgattttttagttcagtgacctgttttatagaattttatatttaaataaaggaaatttagattggtccttttcaaaattcaaaaaaaaaagcaacatcttcatagatgaatgaaacccttgtataagtaatacttcagtaataattatgtatgttatggcttaaaagcaagtttcagtgaaggtcacctggcctggttgtgtgcacaatgtcatgtctgtgattgccttcttacaacagagatgggagctgagtgctagagtaggtgcagaagtggtaggtcagctacaaatttgaggacaagataccaaggcaaaccctagattggggtagagggaaaagggttcaacaaaggctgaactggattcttaaccaagaaacaaataatagcaatggtggtgcaccactgtaccccaggttctagtcatgtgttttttaggacgatttctgtctccacgatggtggaaacagtggggaactactgctggaaaaagccctaatagcagaaataaacattgagttgtacgagtctgaaaaaaaaaaaaaaaaa

SEQ ID NO: 117 - DNA, 409 bp, Homo sapiens
  misc_feature (358): n equals a,t,g, or c
  misc_feature (362): n equals a,t,g, or c
  misc_feature (377): n equals a,t,g, or c
  misc_feature (408): n equals a,t,g, or c
gtgacaatggttctaaaatccaaaactttgtattagaatgggatgaaggaaaaggaaatggagaattttgtcagtgttacatgggctcacagaaacaatttaaaattactaaactttcaccagcaatgggctgtaaattcagactatcggccagaaatgactatggtacaagtggttttagtgaagaagtcttatattacacctcaggctgtgctccttctatgccagcaagtcctgtattaaccaaggctggaattacttggttatccttacaatgggagtaagccctcaggaacaccatcagatgaaggrattttcttacattttagagatggaggaagaaacttcaggrtatggntttnaagcctaaatatggnggagaagatcttgcttacacagtgaaaatcnc

SEQ ID NO: 118 - DNA, 2114 bp, Homo sapiens
ggcacgagcccggcgccgtccccgccccgccccccgtgattccccctgcatggccggcccgggtggggggcgcgggggggcccgggcgccatgcggggggggcacaaagggggtcgctgtgcctgtccccgtgtgatccgaaaagtgctggcaaaatgcggctgctgcttcgcccgggggggacgtgaatcctattccattgcgggcagtgaggggagtatatcggcttctgcttgcctccggtctggctgccccctctggccccagctctggcctcagctctggcccctgttccccaggccccccagggcccgtcagtggcctgaggagatggttggatcattccaaacattgtctcagtgtggaaactgaggcagacagtggtcaggcaggaccatatgagaactggatgttggagccagctctagccacaggagaggagctgccggaactgaccttgctgaccacactgttggagggccctggagataagacgcagccacctgaagaggagactttgtcccaagcccctgagagtgaggaggaacagaagaagaaggctctggaaaggagtatgtatgtcctgagtgaactggtagaaacagagaaaatgtacgtggacgacttggggcagattgtggagggttatatggccaccatggctgctcagggggtccccgagagtcttcgaggccgtgacaggattgtgtttgggaatatccagcaaatctatgagtggcaccgagactatttcttgcaagagctacaacggtgtctgaaagatcctgattggctggctcagctattcatcaaacacgagctccggcagcagctggggcaccgcctgcagctgaacgacctcctcatcaaacctgtgcagcggatcatgaaataccagctgctgctcaaggattttctcaagtattacaatagagctgggatggatactgcagacctagagcaagctgtggaggtcatgtgctttgtgcccaagcgctgcaacgatatgatgacgctggggagattgcggggatttgagggcaaactgactgctcaggggaagctcttgggccaggacactttctgggtcaccgagcctgaggctggagggctgctgtcttcccgaggtcgagagaggcgcgtcttcctctttgagcaaatcatcatcttcagtgaagccctgggaggaggagtgagaggtggaacacagcctggatatgtatacaagaacagcattaaggtgagctgcctgggactggaggggaacctccaaggtgacccttgccgctttgcactgacctccagagggccagagggtgggatccagcgctatgtcctgcaggctgcagaccctgctatcagtcaggcctggatcaagcatgtggctcagatcttggagagccaacgggacttcctcaacgcattgcagtcacccattgagtaccagagacgggagagccagaccaacagcctggggcggccaagagggcctggagtggggagccctggaagaattcggcttggagatcaggcccagggcagcacacacacacccatcaatggctctctcccctctctgctgctgtcacccaaaggggaggtggccagagccctcttgccactggataaacaggcccttggtgacatcccccaggctccccatgactctcctccagtctctccaactccaaaaacccctccctgccaagccagacttgccaagctggatgaagatgagctgtaactggtgaaaaccatgggggtggtgctgactcacccccctattccccaaggagcttcagggcagtccttctggcactgctccagaattcctccttcttggtgtgtctggagggtgggcaaggctgggagggatatcaacttggaggagaacacctagacccaaggacttttttctgcccaaggaacacagtttccttcagctcccatccctatgcatgcatcatggtccccccaaaaggaggatatgtgggtgggtgggagggctggggcaggggccagatagaaattattggttttgttttttaattttgtttttcctgttttctgagaataaaggttttgttatatccaaaaaaaaaaaaaaaaaaaaa

SEQ ID NO: 119 - DNA, 468 bp, Homo sapiens
  misc_feature (30): n equals a,t,g, or c
  misc_feature (34): n equals a,t,g, or c
  misc_feature (36): n equals a,t,g, or c
  misc_feature (457): n equals a,t,g, or c
  misc_feature (464): n equals a,t,g, or c
gccaactctaatagtatcatcacaggcaanggtnanctgcagtacggtcggaatcccgggtcgacccacgcgtccggaagtatttgggattcaattgaaggaaattgataagaatgaccacttgtacattcttctcagcaccttagagcccactgatgcaggcatactgggaacgactaaggactcacccaagctgggtctgctcatggtgcttcttagcatcatcttcatgaatggaaatcggtccagtgaggctgtcatctgggaggtgctgcgcaagttggggctgcgccctgggatacatcattcactctttggggacgtgaagaagctcatcactgatgagtttgtgaagcagaagtacctggactatgccagagtccccaatagcaatcccaaggaatgggcagctcagtaccgagaggcgatggaagcagatttgaaggctgcagctgangctgcanctga

SEQ ID NO: 120 - DNA, 671 bp, Homo sapiens
  misc_feature (582): n equals a,t,g, or c
  misc_feature (649): n equals a,t,g, or c
gctctggagggccagagctgcgactatgccagcaagagctatgatgccgttgtcttcgatgtcttgaaagtgaccccagaggagtttgctagccagattacattaatggatatacctgtgtttaaagctatccagccggaggagtgaagcatggaggtggggacagacttcaagcgatggagatataaacaacctaggaactagccagctgtggatggagtaagaaggagaaacacagtcttgcccctaacgttgtggcctttacccggaggtttaaccaggtcagtttttgggttgtacgagaaattctaacagcacagactttaaaaataagggcagaaatcctcagccattttgtgaaaatagccaagaaacttctagaactcaacaaccttcattctctcatgtctgtggtatcagcattacaaagtgctcccatcttcaggctgacaaaaacctgggctcttttaaatcgaaaagacaagactacctttgagaaattggactacctgatgtcgaaagaagataattacaagcggacacgggaatatatcckaagcctgaagatggttccaagtattncctatctaggtaggaagtttgaattggcttattattttttaagaaacctactcggtgccaataaganggttttacaggttctacctgaa

SEQ ID NO: 121 - DNA, 2156 bp, Homo sapiens
ccacgcgtccgaagaagagcccgaccaggccaaaaagacaagcgaaacctgccgcagacgaagggttttgggattgtagcgtctgcaccttcagaaacagtgctgaagcctttaaatgcagcatctgcgatgtgaggaaaggcacctccaccatgaaaacctcggatcaattctcagctggtggcacaacaagtggcacaacagtatgccaccccaccaccccctaaaaaggagaagaaggagaaagttgaaaagcaggacaaagagaaacctgagaaagacaaggaaattagtcctagtgttaccaagaaaaataccaacaagaaaaccaaaccaaagtctgacattctgaaagatcctcctagtgaagcaaacagcatacagtctgcaaatgctacaacaaagaccagcgaaacaaatcacacctcaaggccccggctgaaaaacgtggacaggagcactgcacagcagttggcagtaactgtgggcaacgtcaccgtcattatcacagactttaaggaaaagactcgctcctcatcgacatcctcatccacagtgacctccagtgcagggtcagaacagcagaaccagagcagctcggggtcagagagcacagacaagggctcctcccgttcctccacgccaaagggcgacatgtcagcagtcaatgatgaatctttctgaaattgcacatggaattgtgaaaactatgaatcagggtatgaaattcaaaacctccacctgcccatgctgcttgcatccctggagaatcttctgtggacatcgacctcttagtgatgctgccaggataatttctgcttgccatgggcatctggccaccaaggaatttcgcaccctgacgattactcttgacacttttatgtattccattgttttatatgattttcctaacaatcatttataattggatgtgctcctgaatctactttttataaaaaaaaaaaaaatctgctgtgcacaattttccatgtacattacaactggttttttgtttttgttttgttgccggtggggagggctgggagggggagggaacttttatttattgtgttcacaaactccatcctttcagcatatccttttaagtttagttctttcttccagttatactatgtactatcagttttgatataactatatatatataaatataaaattatatataaagggttatttgaaaccaatccatggcaacgctggtgcttgatacactgtgaagtgaatacaacattgaacagttacagatctgggacagtcccttctatgaaagtgctgaaatttaattaaaatcagtcttacatgaagtatgttccaatccatgtgggaacttgactctctcatctgtctaaagagtactggacgatataaaaatatatattttttaaacaatgtgatctcaaatttaaagactgctccagatagcctgcatttgcaatggaataactgacaaatcacaagtggtttagttgggcagggctttgatcattcaaaagtaactaaagtagctccagaatgccaagtattcgtgtaaattacggttacatgttatcatttgctgttcttacataagcactcatgaaaatatggtattctgtaacttgaattccatccattttccagacgtctactcatgtctgaggtaaatctagaaattgtcttagttttaggattgaaacagtctataaactgtatttttggtccatccaggaagctagtcccttgtttctcctttctacatgacattgcagtggtggtttctgtaattaaaatttgtttgcctcatgtccctttgtctgataaaccttcactctaccgattcagttgtgagcattctttttttccttctcaaaacctactatgatttgttttactgaacaaaggttatcaaccacacatccagtcctgacatggagcttttcagtgtttggagacatttctcaatcccctgctgtggtaggaactccagtggtgaacggcttgcgcgcctgcagccagagttgcagggaaagctcgtacttactgcgagcagcatgtaatcttttttcttcctggacataaagatagcttgagtaaactgttctatttcattctcttcactctttttactgtcttgcaaaaaaaaaaaaaaaaaaaaa

SEQ ID NO: 122 - DNA, 665 bp, Homo sapiens
  misc_feature (221): n equals a,t,g, or c
  misc_feature (286): n equals a,t,g, or c
  misc_feature (630): n equals a,t,g, or c
  misc_feature (665): n equals a,t,g, or c
gcgggagtcctggccccctaactcaaagttgcctcactcacagagctctccaactgtcagcagcacctgtactaaagtgctctatttcactgaccggtcacttacgcccttcatggtcaatataccaaagaggttggaggaggtgacgttaaaggattttaaagcagctattgatcgggaaggaaatcaccggtatcacttcaaagcactggatcctgagnttggcactggcaaagaggagattttcatgatgatgatgcatccctggatgggaagggaaaattgnagcttgggtggaagaagaccatggagagaattaatgccaagtatcagattgagggcttatggaacctggtcactccctggctgcttcactcaggaaagggaactaaaaccagaatacactaagaagtttctagtttgtgtgccaaaacagaagcttctccaagcatgatggccacaggtcagtcctctttctgtgcctggcatatctggkacttaaaattctgtccaaatgtagaccatgggttcatctggagttccttgtccgtgggaacacagtgttctattctactctgaggacaacaaaccgaggccttgaaacaatggggatggatgatcccgcctctntaggggcatggctgctaattatctggaaattaggn

SEQ ID NO: 123 - DNA, 764 bp, Homo sapiens
  misc_feature (633): n equals a,t,g, or c
  misc_feature (642): n equals a,t,g, or c
  misc_feature (645): n equals a,t,g, or c
  misc_feature (689): n equals a,t,g, or c
  misc_feature (710): n equals a,t,g, or c
  misc_feature (714): n equals a,t,g, or c
attcggcacgagcccaaaatgggccgcaggagcattgagtcccccagtttggggttctgcacagataccctccttccccacctcctagaggatgatctgggccagctgtctgacctggagccagagccagatgcccaaaattggcagcatacagtgggcaaggatgtggtggctgggctaacccagcgggagattgaccggcaagaggtcatcaatgagctgtttgtgactgaagcttcccacctgcgcacactccgggtcctggacctgatcttctaccagcgaatgaagaaggagaacctgatgccccgggaggagctggcccggctcttcccgaacctgcctgaactcatagagattcacaattcctggtgtgaagccatgaagaagctccgggaggaaggccccatcatcaaagagatcagtgacctcatgctggcccggtttgatggccctgcccgagaggaactccagcaagtggctgcacagttctgttcctatcagtcaatagccctagagctaatcaagaccaagcaacgcaaggagagtcgattccagctcttcatgcaggaagctgagagccacccttcagtgtcggcggcttgcagctgagagacctcatcatcttctgangatgcaacnggnttcacccaaagtaccccggcttgctgcttgggagaagcaatcantcaagcaccacaagaagggtngggnacccttcttgagccaatgaaaaaagcttgtgcccgggcccccgggaaccc

SEQ ID NO: 124 - DNA, 618 bp, Homo sapiens
acccacgcgtccgagagtccccaatagcaatccccctgaatatgagttcttctggggcctgcgctcttactatgagaccagcaagatgaaagtcctcaagtttgcctgcaagctccagtcatcccaagagcctgaagcaccaccacctcgggatgtggcccttttgcaagggagggcaaatgatttggtgaagtaccttttggctaaagaccagacgaagattcccatcaagcgctcggacatgctgaaggacatcatcaaagaatacactgatgtgtaccccgaaatcattgaacgagcaggctattctttggagaaggtatttgggattcaattgaaggaaattgataagaatgaccacttgtacattcttctcagcaccttagagcccactgatgcaggcatactgggaacgactaaggactcacccaagctgggtctgctcatggtgcttcttagcatcatcttcatgaatggaaatcggtccagtgaggctgtcatctgggaggtgcatcctcagaaacctactcaacacagcactctaggcagccactatcaatcaattgaagttgacactctgcattaaatctatttgccatttctgaaaaaaaaaaaaaa

SEQ ID NO: 125 - DNA, 698 bp, Homo sapiens
  misc_feature (509): n equals a,t,g, or c
  misc_feature (600): n equals a,t,g, or c
  misc_feature (641): n equals a,t,g, or c
  misc_feature (667): n equals a,t,g, or c
  misc_feature (698): n equals a,t,g, or c
aatgtaattagcacagtgttaaaagtgaacatttcatacaagcaaaaatactgaatacaataaatgtagtagaatcaataattaagtacatgggtaaattaataatatcatccatggtgagctaatgcccctaagaactggatgctttatcatacagttgcttgacattaccaacaagtattgtgacaaatttgattcaatcatttcattatgcaggcagaaaagatagtcttttaaaataactaaacatatgggaatataatgaagagtgtctatmgtaatcatttcatgaagacacaagtctgttcctargctattaatcttacttgcaagtttgatgaaaaaaagaaggatctcatgatttcttgctccaacttcccatgtacagaggctctcttctttcttttccagatagagactgattccttggaagtagctcttcacagcattagggagttgtcatggcctgagagagcccttccacccctaactcattcaacaagcagggntccaggacttcccaatgctgataaaaattcagtggaataatttctccaggggcaggttcattccaaccaacctcttgggttggattaaggngacaaactgctgggggaacctggggggggacagggggtagncttaggccccctgaatttgggtggcnccccccggggaacaattggaaaacattcaan

SEQ ID NO: 126 - DNA, 339 bp, Homo sapiens
aggaagagacgaccctggagccagtccccagagcagcagccagccagaccacggccgcctctcccccccagaagctcccgacaggcccaccatctccacggcctccgagacctcagtgtacgtgacctggattccccgtgggaatggtgggttcccaatccagtccttccgtgtggagtacaagaagctaaagaaagtgggagactggattctggccaccagcgccatccccccrtcgcggctgtccgtggagatcacgggccttagagaaaggcacctmctacaagtttcgagttccgggttytgaacatgctgggggagagcgagcccagsgcccct

SEQ ID NO: 127 - DNA, 1915 bp, Homo sapiens
attcaacctacatcccaattcccacttcagcaatttgtgccacaggatctaatggctctgccccaacacgaatctcagtacaatgcttgtcccctgccaccacaggctcagcatcagtagatctctgttgtaccagagatatttctctgttacctggagagccacctattgctgttcccacaggtgtttttggccccttgccgactggtagtgtcggtttgctatttgatctctcaagcctaaatttaaaaggtgttcaagtacatactggtgtaattgattctgactattcaggtgaaattcatattggcattagctctgcagtcccttgatatacgggagctggagaccgcattgctcagcttcttatactcccttacgttcctttaggatccagttcttgtaccagaactggaggttttggtagcacagactatcaggacaaagcagcttattgagccagcaagatttctgacactcgtcctgtgtgctctgtgcatattcaaggaaggaagtttgagggaatgattgatacgggcgctgatgtctccattatcgctttacatcaatggccccgacaccttgtccatgtccttcctgaagcagtagagcagcccgtagttcttgagcagtgcgtcatggttgtgcgagtttgtgtcaaacttgctgtaggtctgcttgaggatctgcccagtccggcggctgccgtcttccagcctccccatcagcgtttggatgccttcctctaggtcctttaggaggtgatagtcatcgctgtccgaggtgtcatacaccaggttgttggcgaacatactcctgaggaaccgcacggtctccagccacgactcgatgagcagcagggagatgcggagcagctctagattggatttctgttgcgtttcctccatgttggagggtgtcggaatagagtctgagaagcagaaggaggtctgggagtcatgcaggaatgaatacttctggtcctttgggatataggtttcttcaaactcctggtaggtgtcaatggccagctggtgcgcgcgatgggcttggagcatagcgtggtcaaaaagcctggataacggaacggtttggacggcaccagcctcttgaagccagggcaggcagagcagggcaaaagccaggagcagggacgtccgggagcctggagccattgccactaggtgagctggttgagcttctgctaaaacatggacatgcttcagtgctgctcctgagagagtagcaggttaccactctggcaggccccagccctgcagcaaggaggaagaggactcaaaagtctggcctttcactgagcccccgcccctcctgcagcccactcgggacgtggacctcatcctgtcattggactacaacctccacggagccttccaggggtccggcggacacccgaggaggcggcagctggggaggtgaacctgtcttcatcggactctccctaccactacacgaaggtgacctacagccaggaggacgtggacaagctgctgcacctgacacattacaatgtctgcaacaaccaggagcagctgctggaggctctgcgccaggcagggcagcggaggcggaagcgcagggcccactgatggccggggcccgtggcacccctaactctcattcattccctggctggtgagttgcaggtgggaactgtcatcacgcagtgcttcagagcctcgggctcaggtggcactgtcccagggtccaggctgagggctgggagctcccttgcgcctcagcagtttgcagtggggtaaggaggccaagcccatttgtgtaatcacccaaaaccccccggcctgtgcctgttttcccttctgcgctaccttgagtagttggagcacttgatacatacagactcatacaaaaaaaaaaaaaaaaaaaaaaggaa

SEQ ID NO: 128 - DNA, 415 bp, Homo sapiens
  misc_feature (365): n equals a,t,g, or c
ggcacgaggaatgcagagccagagccccggagcctctccctgggcggccatgtgggtttcgacagcctccacactgatgaacacactcttcaacacgaccttcgagactgaggaagccagtcaccatgaggcatgcgtgcgcctgcggccccagacctatgacctccaggagagcaacgtgcagctcaagctgaccattgtggatgccgtgggctttggggatcagatcaataaggatgagaggcccatagttgactacatcgatgcgccagttttgaaaaattatctgcaggargaagctgaaagatccgccgctcgctcttcgaattaccatgacacagggatccacttttgcctctactccntcacgcccacagggcactccctgaaattctctaaatctattgaccttgaa

SEQ ID NO: 129 - DNA, 2281 bp, Homo sapiens
ccacgcgtccgcctctttgcacaatggtggaaccattaagacgttgtcccaagcccttgggacaggcagggtgatggacacttgcaatctgacgccttgaccgtcgagctccgcttttctattgcaggaatcccagcctaaactgcgcatcctgctcgttggttgcacaaggagccgaaggctggtcccttgcccgggaaggacgcctggccggacgcgcgggtcccgccggggttcccgccttagctccggccggagcatcagaatgcagagccagagccccggagcctctccctgggcggccatgtgggtttcgacagcctccccgaccagctggtcagcaagtcggtcactcagggcttcagcttcaacatcctctgtgtgggggagaccggcattggcaaatccacactgatgaacacactcttcaacacgaccttcgagactgaggaagccagtcaccatgaggcatgcgtgcgcctgcggccccagacctacgacctccaggagagcaacgtgcagctcaagctgaccattgtggatgccgtgggctttggggatcagatcaataaggatgagaggcaagaggcgggaagggcggccccacccagcctcctcccaccccacctacattggcccctataacagtagcccagccctcacactgcagggggccagggagggcctcttggggaatatctgaggctctgtggtcaccaacagaccagttactcctttaggtgtctggagaaggggtcagctgcctgtatccagtcagggatctcaggcagaagctgttcccagaaagaaaaggccagggggcagcctggcttggccccgagccctgagccccccaagccccaagcccctgatctcagctggcagcctcctgggtgatggagctgtctgtagttacagaactatagatgactacctctatgcgaatatttaaaattatctgcaggaggagctgaagatccgccgctcgctcttcgactaccatgacacaaggatccacgtttgcctctacttcatcacgcccacagggcactccctgaagtctctagatctagtgaccatgaagaaactagacagcaaggtgaacattattcccatcatcgccaaggctgacaccatctccaagagcgagctccacaagttcaagatcaagatcatgggcgagttggtcagcaacggggtccagatctaccagttccccacggatgatgaggctgttgcagagattaacgcagtcatgaatgcacatctgccctttgccgtggtgggcagcaccgaggaggtgaaggtggggaacaagctggtccgagcacggcagtacccctggggagtggtgcaggtggagaatgagaatcactgcgacttcgtgaagctgcgggagatgttgatccgggtgaacatggaagacctccgcgagcagacccacagccggcactacgagctctaccggcgctgcaagttggaggagatgggctttcaggacagcgatggtgacagccagcccttcagcctacaagagacatacgaggccaagaggaaggagttcctaagtgagctgcagaggaaggaggaagagatgaggcagatgtttgtcaacaaagtgaaggagacagagctggagctgaaggagaaggaaagggagctccatgagaagtttgagcacctgaagcgggtccaccaggaggagaagcgcaaggtggaggaaaagcgccgggaactggaggaggagaccaacgccttcaatcgccggaaggctgcggtggaggccctgcagtcgcaggccttgcacgccacctcgcagcagcccctgaggaaggacaaggacaagaagaacagatcagatataggagcacaccagccgggcatgagcctctccagctctaaggtgatgatgaccaaggccagtgtggagcccttgaactgcagcagctggtggcccgccatacagtgctgcagctgcctggtcagggatgcgacgtggagggaaggattcctctgaggcagcagctccaacacatggggccagctcaggaccaccagggcatggaactggagaccatggtttttaatgttagaacagaaaacgccatacttttcctatatcaatgatcaaaagtgcaaacaatttaaatttccatcagggaacatcaaatgttgcccaacccttttcattcctatccatggctccgtaaggggcttgaggcttaatgcccatcctgtggccaagctgagcttccactccgggaccaaaaaaaaaaaaaaa

SEQ ID NO: 130 - DNA, 1263 bp, Homo sapiens
  misc_feature (1258): n equals a,t,g, or c
tttttttttttttttttagacctgtacagtttttattacataaaatatcacaaaattcacaagtacaacactgcttattttcttgcttgaagatcagatctctggtttatttaatatcaacattcaccacagctgaaggaaattaaactgaacctttaaaaggtaccgcatacggacctggttggggttatatacaatatattcattgtagttgagggtataaccatctggattcagaattcctgtgtcacttgctggtcctaatggcactgtactcccattcagggtgacgaagtgggcagaactgggagccatcttgcccagccccttggtgctatgtttaccttgaagcaatccttcggccttaggattggcctctagtagttcattacactgacctagagctacctctgataagagcagcagtcctgtattctttaggcgagaggcaaagcagtaattggcactcttggaagacatgtcagcaaagtagattcctttcccaaacatgtaacctgtgatgggagcttcaggtggggcaattcgaagcccatggctcaagattcccacccagttactcatcctggaaccatgccatagaagcatcctgttatgaaggtcctctctgaaggcttctttctcaccatccttctccacttcaaacaaatccagcaaggtcatggtatagtcgctgtgtgtgggagcatgggtagattgtaggtactgggaaatcactttgaactcrtaactttcatggtcaagggggcgcaaggcacaatgtaggtttctatagtgttggtccaatgggtgttctgggctttgtagctctgttttcaccagcttaatagcaatttcaatgtctcccaaagcctctagtaattgtattttttctgmcagttccttctgtgtccggattagtggaggagtacggagtccaaagtcatgcggaatcctggtgtagaattcattgcatgcttccatgagagctygtccatgctggccagcccgaatacaatcctcaatcttcttaagagactggtaacctgccttgatttgtgccactgtcagcttcccaagtggggctttcttggtattatacttcatttccatcatcatttcttccatggcctgaacattacagatcaactttattaactcctgtacccgaagatctagctgtgactctggcttcaagggagatttaagagattcctctttctttgtttcctcttcatcctgagtattggtggcatagtcnatctc

SEQ ID NO: 131 - DNA, 669 bp, Homo sapiens
  misc_feature (21): n equals a,t,g, or c
cgctctagcaactagtgggtnccccgggctgcagaattcgggcacgagtccttgcgcccccttgaccatgaaagttatgagttcaaagtgatttcccagtacctacaatctacccatgctcccacacacagcgactataccatgaccttgctggatttgtttgaagtggagaaggatggtgagaaagaagccttcagagaggaccttcataacaggatgcttctatggcatggttccaggatgagtaactgggtgggaatcttgagccatgggcttcgaattgccccacctgaagctcccatcacaggttacatgtttgggaaaggaatctactttgctgacatgtcttccaagagtgccaattactgctttgcctctcgcctaaagaatacaggactgctgctcttatcagaggtagctctaggtcagtgtaatgaactactagaggccaatcctaaggccgaaggattgcttcaaggtaaacatagcaccaaggggctgggcaagatggctcccagttctgcccacttcgtcaccctgaatgggagtacagtgccattaggaccacaaktgacacaggattcctgaatccaratggttatccctcaactacaatgaatatwtttwttttaccccaccagtccctttgcggtcctttaaggcccaatt

SEQ ID NO: 132 - DNA, 3863 bp, Homo sapiens
  misc_feature (3822): n equals a,t,g, or c
  misc_feature (3843): n equals a,t,g, or c
  misc_feature (3844): n equals a,t,g, or c
  misc_feature (3852): n equals a,t,g, or c
gctctgcgagcgttatttcaaaagaagttgagaaccaragaaaccracctaaggggattytcccatttggcccgtcctaccctaaagtcaccacctgctgcttttytggagcgcttaccagtgaccaagaggaacagaacacagagcagcctggcagtgtccaagcaacaagcctccgctcctccttcctgcaccctggggctcctgaaactcacatgggtaaaaaagatacagtaaagacataaataccacatttgacaaatggaaaaaaaggagtgtccagaaaagagtagcagcagtgaggaagagctgccgagacgggtatacagggagctaccctgtgtttctgagaccctctgtgacatctcacattttttccaagaagatgatgagacagaggcagagccattattgttccgtgctgttcctgagtgtcaactatctgggggggacattcccagtgtatcagaagagcaggaatcttcagagggacaagattcaggagacatttgctcagaagagaatcaaatagtttcctcttatgcttctaaagtctgttttgagatcgaagaagattataaaaatcgtcagtttctggggcctgaaggaaatgtggatgttgagttgattgataagagcacaaacagatacagcgtttggttccccactgctggctggtatctgtggtcagccacaggcctcggcttcctggtaagggatgaggtcacagtgacgattgcgtttggttcctggagtcagcacctggccctggacctgcagcaccatgaacagtggctggtgggcggccccttgtttgatgtcactgcagagccagaggaggctgtcgccgaaatccacctcccccacttcatctccctccaagcaggtgaggtggacgtctcctggtttctcgttgcccattttaagaatgaagggatggtcctggagcatccagcccgggtggagcctttctatgctgtcctggaaagccccagcttctctctgatgggcatcctgctgcggatcgccagtgggactcgcctctccatccccatcacttccaacacattgatctattatcacccccaccccgaagatattaagttccacttgtaccttgtccccagcgacgccttgctaacaaaggcgatagatgatgaggaagatcgcttccatggtgtgcgcctgcagacttcgcccccaatggaacccctgaactttggttccagttatattgtgtctaattctgctaacctgaaagtaatgcccaaggagttgaaattgtcctacaggagccctggagaaattcagcacttctcaaaattctatgctgggcagatgaaggaacccattcaacttgagattactgaaaaaagacatgggactttggtgtgggatactgaggtgaagccagtggatctccagcttgtagctgcatcagcccctcctcctttctcaggtgcagcctttgtgaaggagaaccaccggcaactccaagccaggatgggggacctgaaaggggtgctcgatgatctccaggacaatgaggttcttactgagaatgagaaggagctggtggagcaggaaaagacacggcagagcaagaatgaggccttgctgagcatggtggagaagaaaggggacctggccctggacgtgctcttcagaagcattagtgaaagggacccttacctcgtgtcctatcttagacagcagaatttgtaaaatgagtcagttaggtagtctggaagagagaatccagcgttctcattggaaatggataaacagaaatgtgatcattgatttcagtgttcaagacagaagaagactgggtaacatctatcacacaggctttcaggacagacttgtaacctggcatgtacctattgactgtatcctcatgcattttcctcaagaatgtctgaagaaggtagtaatattccttttaaattttttccaaccattgcttgatatatcactattttatccattgacatgattcttgaagacccaggataaaggacatccggataggtgtgtttatgaaggatggggcctggaaaggcaacttttcctgattaatgtgaaaaataattcctatggacactccgtttgaagtatcaccttctcataactaaaagcagaaaagctaacaaaagcttctcagctgaggacactcaaggcatacatgatgacagtcttttttttttttgtatgttaggactttaacactttatctatggctactgttattagaacaatgtaaatgtatttgctgaaagagagcacaaaaatgggagaaaatgcaaacatgagcagaaaatattttcccactggtgtgtagcctgctacaaggagttgttgggttaaatgttcatggtcaactccaaggaatactgagatgaaatgtggtaaatcaactccacagaaccaccaaaaagaaaatgagggtaattcagcttattctgagacagacattcctggcaatgtaccatacaaaaaataagccaactctgacatttggattctaccatagactctgtcattttgtagccatttcagctgtcttttgattaatgttttcgtggcacacatatttccatccttttatgtttaatctgtttaaaacaagttcctagtagacaccatctggttgagtcagttttttttatggtgtattttgaacccattctgatagtctcttttaactggaagatttcaattacttacgttaatgtaattattaatatgttaggatttatcctcagtcagccagtttgttatgtcttttctattctactgttatcacatttgtaccacttaaagtggaatctaggcactttatcaccatttagatcctattaccttttctcatctaggatatagttatcttctacataatctttctgtatcttaaaacccatcaataaattattatatattttctacttttaatcactcagaagatttaaaaaactcatgagaagagtaatctgttatgtttttccagatatttaccatttctgttgctcttccttcattattttccaaatttcgttctgcaaatttccacttcytctgatagacgttttttagttcttttagagtggttctgataggtacagattctcttattttttgcttcctctgaggacatctttttctcaccttcattctcagtgatgttttttgcttgtagtatttttagttgacattgttttctgttcagcagtttccttttagcttmcgtatttcctgatgagaaatctgcagtcattcaaattgttgtttccctgtatgtagtgtgtcatttttctgtcagatttcaaggtatttatctttagtttttagccatttcattatgttggggatgagtttccttgttttattccctttggaatttgctccaattcataaatttgcagttttatgtcttttaccaaacttagaggttttcagcctaatttctaaaaatactttttattagcctgattttcatctttataggaaatagtttaagtgatgacaagttccaatagcttatatgcccagaaggccttcaaaataagaattttgaaagaatacagaaaacaaacttttatatccttctcatgtcttctactgtaaaattcatatgctttgctactctaaacctagtttgaaatcaacagtcttgagaatagatgaaaattttgatgaatagtggaattcttttaaatggaaacctcttacatgtgattttccttgccatctagaaataaaccatagtatttatgttgaaaaaaaaaaaaaaagggcggccgctgtagaggatccaagaantacgtaggggtgtttccagtnngataaatnaagtatttcca

SEQ ID NO: 133 - DNA, 3707 bp, Homo sapiens
gggtcgacccacgcgtccggtgagtctgcggctcggcgacttggtgtgggggaaactcggccgatatcctccttggccaggaaagattgttaatccaccaaaggacttgaagaaacctcgcggaaagaaatgcttctttgtgaaattttttggaacagaagatcatgcctggatcaaagtggaacagctgaagccatatcatgctcataaagaggaaatgataaaaattaacaagggtaaacgattccagcaagcggtagatgctgtcgaagagttcctcaggagagccaaagggaaagaccagacgtcatcccacaattcttctgatgacaagaatcgacgtaattccagtgaggagagaagtaggccaaactcaggtgatgagaagcgcaaacttagcctgtctgaagggaaggtgaagaagaacatgggagaaggaaagaagagggtgtcttcaggctcttcagagagaggctccaaatcccctctgaaaagagcccaagagcaaagtccccggaagcggggtcggcccccaaaggatgagaaggatctcaccatcccggagtctagtaccgtgaaggggatgatggccggaccgatggccgcgtttaaatggcagccaaccgcaagcgagcctgttaaagatgcagatcctcatttccatcatttcctgctaagccaaacagagaagccagctgtctgttaccaggcaatcacgaagaagttgaaaatatgtgaagaggaaactggctccacctccatccaggcagctgacagcacagccgtgaatggcagcatcacacccacagacaaaaagataggatttttgggccttggtctcatgggaagtggaatcgtctccaacttgctaaaaatgggtcacacagtgactgtctggaaccgcactgcagagaaagagggggcccgtctgggaagaacccccgctgaagtcgtctcaacctgcgacatcactttcgcctgcgtgtcggatcccaaggcggccaaggacctggtgctgggccccagtggtgtgctgcaagggatccgccctgggaagtgctacgtggacatgtcaacagtggacgctgacaccgtcactgagctggcccaggtgattgtgtccaggggggggcgctttctggaagcccccgtctcagggaatcagcagctgtctaatgacgggatgttggtgatcttagcggctggagacaggggcttatatgaggactgcagcagctgcttccaggcgatggggaagacctccttcttcctaggtgaagtgggcaatgcagccaagatgatgctgatcgtgaacatggtccaagggagcttcatggccactattgccgaggggctgaccctggcccaggtgacaggccagtcccagcagacactcttggacatcctcaatcagggacagttggccagcatcttcctggaccagaagtgccaaaatatcctgcaaggaaactttaagcctgatttctacctgaaatacattcagaaggatctccgcttagccattgcgctgggtgatgcggtcaaccatccgactcccatggcagctgcagcaaatgaggtgtacaaaagagccaaggcgctggaccagtccgacaacgatatgtccgccgtgtaccgagcctacatacactaagctgtcgacaccccgccctcacccctccaatcccccctctgaccccctcttcctcacatggggtcgggggcctgggagttcattctggaccagcccacctatctccatttccttttatacagactttgagacttgccatcagcacagcacacagcagcacccttcccctgaggccggtggggaggggacaagtgtcagcaggattggcgtgtgggaaagctcttgagctgggcactggccccccggacgaggtggctgtgtgttcacacacacacacacacacacacacacacacacacacacaggctctcgccccaggatagaagctgcccagaaactgctgcctggctttttttcttccgagcttgtcttatctcaaaccccttccagtcaaggaactagaatcagcaacgagagttggaagccttcccacagcttcccccagagcgaagaggctgtagtcatgtccccatcccccactggattccctacaaggagaggccttgggcccagatgagccagtacagactccagacagaggggcccttggggccctccaacctcaggtgatgagctgagaaagatgttcacgtctaagcgtccagtgtgcacccagcgctccatagacgcctttgtgaactgaaaagagactggcagagtcccgagaagatggggccctggctttccagggagtgcagcaagcagccggcctgcaggtgagcatggaggcccggccctcaccgcctcgaagccatgccccagatgccactgccacagcgggcgctcgctcctccctaggctgttttagtatttggatttgcattccatcccttgggagggagtcctcagggccactagtgatgagccaagaggagtgggggttgggggcgctcctttctgtttccgttaggccacagactcttcacctggctctgaagagccactcttacctcggtcccctcccagtggtcccaccttctccaccctgccctgccaagtcccctgcatgcccaccgctctccatcctccctcctctccctcttcctcccgtggagacagtatttctttctgtctgtccctttggcccagacccagcctgaccaacgatgagcatttcttaggctcagctcttgatacggaaacgagtgtcttcactccagccagcatcatggtcttcggtgcttcccgggcccggggtctgtcgggagggaagagaactgggcctgacctacctgaactgactggccctccgaggtgggtctgggacatcctagaggccctacatttgtccttggataggggaccggggggggcttggaatgttgcaaaaaaaaaagttacccaagggatgtcagttttttatccctctgcatgggttggattttccaaaatcataatttgcagaaggaaggccagcatttacgatgcaatatgtaattatatatagggtggccacactagggcggggtccttcccccctcacagctttggcccctttcagagattagaaactgggttagaggattgcagaagacgagtggggggagggcagggaagatgcctgtcgggtttttagcacagttcatttcactgggattttgaagcatttctgtctgaacacaaagcctgttctagtcctggcggaacacactgggggtgggggcgggggaagatgcggtaatgaaaccggttagtcaattttgtcttaatattgttgacaattctgtaaagttcctttttatgaatatttctgtttaagctatttcacctttcttttgaaatccttcccttttaaggagaaaatgtgacacttgtgaaaaagcttgtaagaaagcccctcccttttttctttaaacctttaaatgacaaatctaggtaattaaggttgtgaatttttatttttgctttgtttttaatgaacatttgtctttcagaataggattgtgtgataatgtttaaatggcaaaaacaaaacatgattttgtgcaattaacaaagctactgcaagaaaaataaaacacttcttggtaacacaaaaaaaaaaaaaaaaaaa

SEQ ID NO: 134 - DNA, 1316 bp, Homo sapiens
ggcacgagcacacacaccaggccctgccaggacaaggcagctcctggaagctccaccaggacccacgtccaccaggcatctcgaacccttggcccccatggaccccctgaggcgctccccctctccctgcctgtcctcgcagccctccagccccagcaccccaccctgcgagatgcttggtcctgtgggcattgaggctgtgctggaccagctgaagatcaaggctatgaagatggggtttgagttcaacatcatggtggtggggcaaagcgggctgggcaagtccacgatggtgaacacgctgttcaagtccaaagtgtggaagtcaaacccaccgggcttgggggtgcccacaccccagacgctgcagctgcattcactgacccatgtcatagaggagaagggtgtgaagctgaagctgacggtgacggacacgcccggcttcggggaccagatcaacaatgacaactgctgggaccccatcctgggctacatcaacgagcaatacgagcagtacctgcaggaggagatcctcatcacccgccagcgccacatcccagacacccgggtgcactgctgcgtgtactttgtaccacccactgggcactgcctgcggcccctggacattgagttcctgcagcggctgtgccggactgtgaatgtggtgcccgtgattgccagggccgacagcctgaccatggaggagcgagaggccttcaggcgcaggatccagcagaacctgaggacccactgcatcgacgtctacccccagatgtgctttgacgaggacatcaatgacaaaatcctcaacagcaagttacgggaccgaatcccttttgccgtggtaggggctgaccaagagcacctggtgaacgggaggtgtgtcctgggccggaagaccaagtggggcatcattgaagtggagaacatggcgcactgtgaatttcctctcctgagagacctgcttatccgctcccacctccaagacctgaaggacataacccacaacatccactatgagaactaccgcgtcatcagactcaatgaaagccacctgctgccccgcgggcccggctgggtgaacctggccccggcctccccaggacagctgaccaccccccggaccttcaaggtctgcaggggggcccatgacgattctgatgatgagttctgaccaccggcggatcccggggctgctgggcttcctgagtccccagcggctctcaacacacacctatgtaccagagcatctattaaatgtgagccttgctttttatgaaaagctgtgctttgaaaacaaaaaaaaaaaaaaaaaa

SEQ ID NO: 135 - DNA, 450 bp, Homo sapiens
  misc_feature (400): n equals a,t,g, or c
  misc_feature (420): n equals a,t,g, or c
  misc_feature (424): n equals a,t,g, or c
  misc_feature (443): n equals a,t,g, or c
gcgctgcttgaaatctacgagaaggatgagaagatccagaagcatcttcaggactccttggcagatctgaagagcctatacaacgaatggggatgcacaaattatattaacctgggctccttcctcatcaaaccagtacagagagtaatgcgttacccgctgttgctaatggagttgctgaattccaccccagaatcccacccagataaagtgcctttaaccaatgcagtccttgcggtcaaggaaatcaaygttaacattaatgaatataaacggcgaaaggacctggtcctcaagtaccgtaagggtgatgaagatagccttatggagaaaatttccaaactgaacatccactccatcatcaagaaatccaaccgagttagcagtcacctgaagcatntcactggctttgctcctcanatanaagatgaaagtatttgaanaaacaga

SEQ ID NO: 136 - DNA, 605 bp, Homo sapiens
  misc_feature (578): n equals a,t,g, or c
  misc_feature (591): n equals a,t,g, or c
agttctgcaccaaatgcagttgccttcaccagaagattcaatcatgtaagcttttgggttgttagagagattcttcatgctcaaacattaaaaattagagcagaagttttgagccactatattaaaactgctaagaaactgtatgagctgaataaccttcatgcacttatggcagtggtttctggcctacagagtgccccaattttcaggttgactaaaacatgggcgttattaagtcgaaaagacaaaactacctttgaaaaattagaatatgtaatgagtaaagaagataactacaaaagactcagagactatataagtagcttaaagatgacaccttgcattccctatttaggtatctatttgtcagatttaacatacatcgattcagcatacccatcaactggcagcattctagaaaatgagcaaagatcaaatttaatgaataatatccttcgaataatttctgatttacagcagtcttgtgaatatgatattcccatgttgcctcatgtccaaaaatatctcaactctgttcagtatatagaagaactacaaaaattttgtggaagacgatnattaccagtaggntggatcttcaaaag

SEQ ID NO: 137 - DNA, 1468 bp, Homo sapiens
ggatcgtaggagccaaatgtttgttttccttcttatcccttcgagaccaaatgcagcccaggcagtggtgaggcactactttcttgaagagttgtgcatccatgtaggtcagctgctctgccacgagatcttctgagaagcacgtgaattctgctgactctccaccctccagttcctcttcctcttccaggctgaaggagatcgtgttgggaagcccatctgttcacatatggaaaagattagtaatttggcgccagtgtatataatcttgcttatagagtcatcagactttactccttgtttaggaagaagagggccaatcctccagaacagccacagggagacaaccacaagcacaatgcatctgagaacaatggagatcttcccatctctgcttgttcttagattctctattaagatcagagccctcatgctctcactctgacaaatcactggctcctaggccaaggacagagccaggataggcaaagtctagagagagccctttgtctagggctctttcaaactttttgatcagatcagctccaggactaatccaactaactcctaaaccccaaccatgcaatttttggttgctgggcgacttataaccagaagcctggaaggactcgccatgaaggcaggtatgactttgggcaataaaatgagccattttggtgttagaaatgctgacgaagccctcaaaattctcaaaatgttcagagtcactttcaacttccacccaaagctaagaatgcatgaagcagaacagtcttcaactaaattcacctgaacctatcacagccaagatcatcaattagcaaattacatagggcacagcatgaagaagagaaaatcagtacccaggattccgaataaaaagcagaagagcccacacctggaataggacctccagtctccattttgaaagactggaatttgatgaaggttttctgacttaaatccccagccttcctttcctggaacctttccccagtgctcgggttgtttcccaacctcagccccttcacacccctcacactccttcctgtcaaacctgttctcaaggaaagaaaactctagttacattcagttatatcttagcagaaatgtaaatcagcatgttactactcccccagaatgcttatattttgagccttttctttctttctttgtagaattaaagactattgggcatcttggattaagtcacagtggctttccttcattttccagggaaaaggagcttccgagagtggaccctacaccacttccccttagggcagcatgtggttatctgcctatactggtggcaggtatgtgatttgaggattgcccctttaccctggacttgaagttccagatgccaatgggggttgggttatgactgaaaaacgtagaaggggatcactgcctatccccgctcgtgccgaattcgatatcaagcttatcgataccgtcgacccga

SEQ ID NO: 138 - DNA, 552 bp, Homo sapiens
  misc_feature (531): n equals a,t,g, or c
  misc_feature (537): n equals a,t,g, or c
  misc_feature (549): n equals a,t,g, or c
gacttggggcagattgtggagggttatatggccaccatggctgctcagggggtccccgagagtcttcgaggccgtgacaggattgtgtttgggaatatccagcaaatctatgagtggcaccgagactatttcttgcaagagctacaacggtgtctgaaagatcctgattggctggctcagctattcatcaaacacgagcgccggctgcatatgtatgtggtgtactgtcagaataagcccaagtcagagcatgtggtgtcagagtttggggacagctactttgaggagctccggcagcagctggggcaccgcctgcagctgaacgacctcctcatcaaacctgtgcagcggatcatgaaataccagctgctgctcaaggattttctcaagtattacaatagagctgggatggatactgcagacctagagcaagctgtggargtcatgtgctttgtgcccaagcgctgcaacgatatgatgacgctggggaaaattgcggggatttgaagggcaactgattgctcagggggnaaactnttgggcccaggnaca

SEQ ID NO: 139 - DNA, 2150 bp, Homo sapiens
  misc_feature (1): n equals a,t,g, or c
ngtatcgactactatagggcgaattaggtacgggccccccctcgagttttttttttttttttttttttgatataacaaaacctttattctcagaaaacaggaaaaacaaaattaaaaaacaaaaccaataatttctatctggcccctgccccagccctcccacccacccacatatcctccttttggggggaccatgatgcatgcatagggatgggagctgaaggaaactgtgttccttgggcagaaaaaagtccttgggtctaggtgttctcctccaagttgatatccctcccagccttgcccaccctccagacacaccaagaaggaggaattctggagcagtgccagaaggactgccctgaagctccttggggaataggcggctgagtcagcaccacccccatggttttcaccagttacagctcatcttcatccagcttggcaagtctggcttggcagggaggggtttttggagttggagagactggaggagagtcatggggagcctgggggatgtcaccaagggcctgtttatccagtggcaagagggctctggccacctcccctttgggtgacagcagcagagaggggagagagccattgatgggtgtgtgtgtgctgccctgggcctgatctccaagccgaattcttccagggctccccactccaggccctcttggccgccccaggctgttggtctggctctcccgtctctggtactcaatgggtgactgcaatgcgttgaggaagtcccgttggctctccaagatctgagccacatgcttgatccaggcctgactgatagcagggtctgcagcctgcaggacatagcgctggatcccaccctctggccctctggaggtcagtgcaaagcggcaagggtcaccttggaggttcccctccagtcccaggcagctcaccttaatgctgttcttgtatacatatccaggctgtgttccacctctcactcctcctcccagggcttcactgaagatgatgatttgctcaaagaggaagacgcgcctctctcgacctcgggaagacagcagccctccagcctcaggctcggtgacccagaaagtgtcctggcccaagagcttcccctgagcagtcagtttgccctcaaatccccgcaatctccccagcgtcatcatatcgttgcagcgcttgggcacaaagcacatgacctccacagcttgctctaggtctgcagtatccatcccagctctattgtaatacttgagaaaatccttgagcagcagctggtatttcatgatccgctgcacaggtttgatgaggaggtcgttcagctgcaggcggtgccccagctgctgccggagctcgtgtttgatgaatagctgagccagccaatcaggatctttcagacaccgttgtagctcttgcaagaaatagtctcggtgccactcatagatttgctggatattcccaaacacaatcctgtcacggcctcgaagactctcggggaccccctgagcagccatggtggccatataaccctccacaatctgccccaagtcgtccacgtacattttctctgtttctaccagttcactcaggacatacatactcctttccagagccttcttcttctgttcctcctcactctcaggggcttgggacaaagtctcctcttcaggtggctgcgtcttatctccagggccctccaacagtgtggtcagcaaggtcagttccggcagctcctctcctgtggctagagctggctccaacatccagttctcatatggtcctgcctgaccactgtctgcctcagtttccacactgagacaatgtttggaatgatccaaccatctcctcaggccactgacgggccctggggggcctggggaacaggggccagagctgaggccagagctggggccagagggggcagccagaccggaggcagcagaagccgatatactcccctcactgcccgcaatggaataggattcacgtcccccccgggcgaagcagcagccgcattttgccagcacttttcggatcacacggggacaggcacagcgaccccctttgtgccccccccgcatggcgcccgggcccccccgcgccccccacccgggccggccatgcagggggaatcacggggggcggggcggggacggcgccgg

SEQ ID NO: 140 - DNA, 1513 bp, Homo sapiens
  misc_feature (1225): n equals a,t,g, or c
  misc_feature (1295): n equals a,t,g, or c
caatggtgtagagttgtgtgaaacccctagcatagagacagacagcgaagagatggtgtgaaaagcttgcagaaccagacagagaaccccacagactttccactccaagcacaggaggaggtagctagcgtgtgagggttggcacttttgttttggtgagggagagagggaaacacttgggcacaaagaggggaagggactgtgaatcccaggggagcaccctggccagatcccagcggtgttcgaatcccakgaccatcttccatctacagcctagctgcctccttccctggtcaacccttcctggtgcccatccaccacactgcccaacctcactccccgtcccctcccacaaagagtgacagtggcctggggctcgrcctctcctgaccccaggggaggatgggtgatctgggcctcctgmtacctgccacctgggcctcctatctccagctgggagccagggacctacccacgggcctggcctgrcctctctccccctcccctcatgcttccagaccctgccgcagcctgcggtccagggccaggagctgcctcaggaagccccggttggggatgatgcctcggtggtctttgactttcttgatggcctccacgagggtaaggtggtggtacagcatgaggtaggccartaccagggtggcggatcggctcacgcccacagcacaatgcaccaggatcttccctcctggctggctcagcgcccggtggatgaartcggcagccgtctggaagtggatgctcatgtcaaaggctggcgagtcgtgggcctcaacacccaggtagcggatgcccagcccctcataggcctcgggcgtgcctcgccaccggctgtgtgaggcattgaggacgtgcgtgatgcccaggcggcgaagctcccggcggttgttagccatgtcctggtctccgagatagaggcctggccagacctcgtcggcatggttacaggctgtcttgcctgtgtagaggagccgctccaactcgaagacattgaggaaaggatgttgaacggttggcatctcctccagggtccctcgagttcgaacaggagaccttgagctactccgggagaagcgggccataaaagtcatagaagcccaaagccagttaccagggcacatcttagaggtggcagaaaccgtggcagctgcaggagtggctgtggtgatgatgggttcagttgccaggtagctgctctttgcanagctgcgctgggcctcagtccgaaagcggatcgccgcgcagacagcgccacggccatgacgctcctgctntgtcgccgccgctgtttctgcccaagacaggttgacagattagcagctatttttaagccatgacacacacgtcgaagcagggttcaaatcagcgtgtgcgctrgtgacataaagggactcggtctyacattcggtggcccgagtcgccaggcagcgtgggctccccagccaaccccccacgagcccgcgcgccttgcagaccagacacggccccgccg

SEQ ID NO: 141 - DNA, 347 bp, Homo sapiens
  misc_feature (327): n equals a,t,g, or c
  misc_feature (344): n equals a,t,g, or c
gcgcctgaaggagagagctttgtttaagactgagaaagtgagggtccgagagtctaatgaatgctctgggcacccaggccgcacctgaggagcaccgacgactgcacggtctgcggcgcgggaagcagatctgcggctgaacctctaccccaattacttagcggcgactgagcctatcgagcagttttccatggacacagcctagcakaaagacgcagccttcgtgcttcgctgactgctgaccactgacccaccgccttgatgacagcaccctcgtgtgccttcccagttcagttccggcagccctcagtcagcggcctctcgcanataaccaaaagcctgtntat

SEQ ID NO: 142 - DNA, 467 bp, Homo sapiens
  misc_feature (428): n equals a,t,g, or c
  misc_feature (467): n equals a,t,g, or c
ggcacgagtacgagttcaaagtgagaccatcctctggccgggytcgaggccctgacagcaacgtgctgctcctgaggctgccggaaaaagtgcccagtgccccacctcaggaagtgactctaaagcctggcaatggcactgtctttgtgagctgggtcccaccacctgctgaaaaccacaatggcatcatccgtggctaccaggtctggagcctgggcaacacatcactgccaccagccaactggactgtagttggtgagcagacccagctggaaatcgccacccatatgccrggctcctactgcgtgcaatggctgcagtcactggtgctggagctggggagcccagtagacctgtctgsctccttttagagcaggccatggagcgagcacccaagaacccatgagcatggtccctgggacctggancagctgaaggctacttggaagcggctgaagtcatgccan

SEQ ID NO: 143 - DNA, 641 bp, Homo sapiens
  misc_feature (578): n equals a,t,g, or c
  misc_feature (624): n equals a,t,g, or c
  misc_feature (626): n equals a,t,g, or c
  misc_feature (633): n equals a,t,g, or c
  misc_feature (640): n equals a,t,g, or c
ggtggagtaagccagaaggctgttcacccgaggaagtgatcacctacaccttggaaattcaggaggatgaaaatgataaccttttccacccaaaatacactggagaggatttaacctgtactgtgaaaaatctcaaaagaagcacacagtataaattcaggctgactgcttctaatacggaaggaaaaagctgtccaagcgaagttcttgtttgtacgacgagtcctgacaggcctggacctcctaccagaccgcttgtcaaaggcccagttacatctcatggctttagtgtcaaatgggatccccctaaggacaatggtggttcagaaatcctcaagtacttgctagagattactgatggaaattctgaagcgaatcagtgggaagtggcctacagtgggtcggctaccgaatacaccttcacccacttgaaaccaggcactttgtacaaactccgagcatgctgcatcagtaccggcggacacagccagtgttctgaaagtctccctgttygcacactaagcattgcaccaggtcmatgtcgaccaccgagggtttgggtagaccaaagcacaaanaagtccacttagagtgggaatgttcctgcatcggaaagtggctgtnangtctcanagtacanc

SEQ ID NO: 144 - DNA, 1035 bp, Homo sapiens
gggtcgacccacgcgtccgataagtagcaaaaaaaagaaaaagatgatgtatctcacaaccagaaatgcagaatttgatcgtcatgaaatccagatatatgaggaggtagccaaaatgcctcccttccagagaaaaacattagtattgataggagctcaaggtgtaggccgaagaagcttgaaaaacaggttcatagtattgaatcccactagatttggaactacggtgccatttacttcacggaaaccaagggaagatgaaaaagatggccaggcatataagtttgtgtcacgatctgagatggaagcagatattaaagctggaaagtatttggaacatggggaatatgaaggaaatctctatggaaccaaaattgattctattcttgaggttgtccaaactggacggacttgcattctggatgtcaacccacaagcactgaaagtattgaggacatcagagtttatgccctatgtggtatttattgcggctccggagctagagacgttacgtgccatgcacaaggctgtggtggatgcaggaatcactaccaagcttctgaccgactctgacttgaagaaaacagtggatgaaagtgcacggattcagagagcatacaaccactattttgatttgatcatcataaatgataatctagacaaagcctttgaaaaactgcaaactgccatagagaaactgagaatggaaccacagtgggtcccaatcagctgggtttactgatgattcagtaaggttaacaatgaaaattaaactcttaaaaagtgactgcaacaaataaaccttctactgagaaaatacatcacagatagaagattatctgctaagtccaggcatttttatggtgtagattgaaataatagtacacttctgaatttttatataaaatgtggttggaaggtgtactaatatataatttatcttaatttttctaactttgtatggataatctttctattcatatcacataaagaaatgcgttgaagcattttgtaaaaaaaaaaaaaaaaaaaaaa

SEQ ID NO: 145 - DNA, 1178 bp, Homo sapiens
  misc_feature (1032): n equals a,t,g, or c
  misc_feature (1071): n equals a,t,g, or c
  misc_feature (1171): n equals a,t,g, or c
gttacctgcagaggctgccctgaagctccctgtggcctggagactatgtacaagaggaatggtctgatggctagcgtgttggtcacctctgccactccacagggcagcagcagctcggactctctggagggccagagctgcgactatgccagcaagagctatgatgccgttgtcttcgatgtcttgaaagtgaccccagaggagtttgctagccagattacattaatggatatacctgtgtttaaagctatccagccggagaactagccagctgtggatggtaagaaggagaaacacagtcttgcccctaacgttgtggcctttacccggagtttaaccaggtcagtttttgggttgtacgagaaattctaacagcacagactttaaaaataagggcagaaatcctcagccattttgtgaaaatagccaagaaacttctagaactcaacaaccttcattctctcatgtctgtggtatcagcattacaaagtgctcccatcttcaggctgacaaaaacctgggctcttttaaatcgaaaagacaagactacctttgagaaattggactacctgatgtcgaaagaagataattacaagcggacacgggaatatatccgaagcctgaagatggttccaagtattccctatctaggaatctatcttctggatttaatctacattgattctgcatatcctgcctcaggagtatcatggaaaatgaacaaagatccaatcagatgaacaatattcttcgaataattgctgatttacaagtttcctgcagctatgatcacctcaccaccctgccccatgtgcagaagtacctgaagtccgtacgctacattgaagagctccagaagtttgtggaagacgacaactacaaactgtcgctcagaatcgaaccaggaagcagctctccaagactagtctcttccaaggaagatcttgcaggtccctctgctggctccggttctgcgaggttcagccggaggcacctgtcctgacacatctgttgctggcagcctccccacanctccagtgcccagacacagggaagagccacagcctaggnaacaatatggatgtgttcagttgagtgttagttgaggagtaaaagtgcgacatttcccttcggagaaaggcaagggcacctacttggacgacagtgttcntagagtt

SEQ ID NO: 146 - DNA, 1204 bp, Homo sapiens
  misc_feature (1196): n equals a,t,g, or c
gggaaaagccactaaatgacactgtyactgaatatgaagttatatccagagaaaatgggtcattcagtgggaagaacaagtccattcaaatgacaaatcagacattttccacagtagaaaatctgaaaccaaacacgagttatgaattccaggtgaaacccaaaaacccrcttggtgaaggcccggtcagcaacacagtggcattcagtactgaatcagcggacccaagagtgagtgagccagtttctgcaggaagagatgccatctggactgaaagaccctttaattcagactcttactcagagtgtaagggcaaacaatatgtcaaaaggacatggtataaaaaatttgtaggagtgcagctgtgcaactctctcagatacaagatttacttgagcgactccctcacaggaaaattttataacataggtgatcagaggggccatggagaagatcactgccagtttgtggattcatttttagatggacgcactgggcagcaactcacttctgaccagttaccaatcaaagaaggttatttcagagcagttcgccaggaacctgtccaatttggagaaataggtggtcacaccaaatcaattatgttcagtggtatgaatgtgggactacaattcctggaaaatggtagatgctgcacaaagttaccttctgtttcatcattgcaaacaaaaatcattgaaaatactatgccgcattcatttaaagctattttgtttactatgtataaaagtctacaatctaattaatagcaatactagatgtttattattagaaaagattgctgagagtatttatcaggttttacaaagtcattttaagaaagcaagatactgatgttaacagaataacatttttggggaagctggctccctattcatggtattttaagagatcatttgtatattatttatcacactgttgtaatgatgttttgagatacttttataacaaaattaacatcaaaaaggtatatactttttaaaaaaaatttacttttattgatgtgtactcttcctattgatgagttaattccataaatctctacttagtttaacttattggatcaaattatcttcagcatgtatatctgggaaaaaaagggccgattttcacatttatatttaaacttcaattttttatatttaaacttcaatttttagcaacagctgaatagnttttgcgg

SEQ ID NO: 147 - DNA, 1785 bp, Homo sapiens
ctgcaggaattcggcacgaggtggctctcctccgcggtcgcgtcataggccgaacaaccaaacagaaaagtttaataaacagcggacggaggggccggcggtggcggagccggagcaagcaggggttcggcggcattacctgtacccattcaccggcggctaccggcggcggcgcgcagcgtgtcaggcggagagacccgccgccaggaatgaatctgaagtctgctgcagtaaaacacagaaggctttaaaatgttttcttgcataaaattcaaaacttttaagtagctgcttatgagaatagggaaggcagaaagctaatgtctgtctcaagatacaggacagctgtttgctcatcaacctcaactgtgtgtgcaactgaggaacatggctcaagaaactaatcacagccaagtgcctatgctttgttccactggctgtggattttatggaaaccctcgtacaaatggcatgtgttcagtatgctataaagaacatcttcaaagacagaatagtagtaatggtagaataagcccacctgcaacctctgtcagtagtctgtctgaatctttaccagttcaatgcacagatggcagtgtgccagaagcccagtcagcattagactctacatcttcatctatgcagcccagccctgtatcaaatcagtcacttttatcagaatctgtagcatcttctcaattggacagtacatctgtggacaaagcagtacctgaaacagaagatgtgcaggcttcagtatcagacacagcacagcagccatctgaagagcaaagcaagtctcttgaaaaaccgaaacaaaaaaagaatcgctgtttcatgtgcaggaagaaagtgggacttactgggtttgaatgccggtgtggaaatgtttactgtggtgtacaccgttactcagatgtacacaattgctcttacaattacaaagccgatgctgctgagaaaatcagaaaagaaaatccagtagttgttggtgaaaagatccaaaagatttgaactcctgctggaatacaaaattcttgagcatctgcaaactaaaaattgacttgaggttttttttttcctagtcattgggaatgtagagcagtgtatcttgcatgtcatcggaagaatagatttttgttttggttttgttttgaaaatgactctgaacatttatttccattgcaatttctgtggctgaggagacttaaactttacaagtattatccttttaagatcattttaattttagttgagtgcagagggcttttataacaaacgtgcagaaattttggagggctgtgatttttccagtattaaacatgcatgcattaatcttgcagtttattttctcattgtgtatgtatatatcgcttttctctgcagcacgatttctcttttgataatgccctttagggcacaactagttatcagtaactgaatgtatcttaatcattatggctgcttctgttttttcattaacaaaggttattcatatgttagcatatagtttctttgcacccactatttatgtctgaatcatttgtcacaagagagtgtgtgctgatgagattgtaagtttgtgtgtttaaacttttttttgagcgagggaagaaaaagctgtatgcatttcattgctgtctacaggtttctttcagattatgttcatgggtttgtgtgtatacaatatgaagaatgatctgaagtaattgtgctgtatttatgtttattcaccagtctttgattaaataaaaaggaaagccaaaaaaaaaaaaaaaaaaaaaa

SEQ ID NO: 148 - DNA, 2851 bp, Homo sapiens
gggtcgacccacgcgtccgcggaggcagcctagcctcgcgccccgcccgttgcttctgccctccggccttcccgccgccgtcgccgggaccagccgctcggggccgggctgatacagccgcttcaccgtgcccctgcccgcgaccatggcctcctccgaggtggcgcggcacctgctctttcagtctcacatggcaacgaaaacaacttgtatgtcttcacaaggatcagatgatgaacagataaaaagagaaaacattcgttcgttgactatgtctggccatgttggttttgagagtttgcctgatcagctggtgaacagatccattcagcaaggtttctgctttaatattctctgtgtgggggaaactggaattggaaaatcaacactgattgacacattgtttaatactaattttgaagactatgaatcctcacatttttgcccaaatgttaaacttaaagctcagacatatgaactccaggaaagtaatgttcaattgaaattgaccattgtgaatacagtgggatttggtgaccaaataaataaagaagagagctaccaaccaatagttgactacatagatgctcagtttgaggcctatctccaagaagaactgaagattaagcgttctctctttacctaccatgattctcgcatccatgtgtgtctctacttcatttcaccgacaggccactctctgaagacacttgatctcttaaccatgaagaaccttgacagcaaggtaaacattataccagtgattgccaaagcagatacggtttctaaaactgaattacagaagtttaagatcaagctcatgagtgaattggtcagcaatggcgtccagatataccagttcccaacggatgatgacactattgctaaggtcaacgctgcaatgaatggacagttgccgtttgctgttgtgggaagtatggatgaggtaaaagtcggaaacaagatggtcaaagctcgccagtacccttggggtgttgtacaagtggaaaatgaaaaccactgtgactttgtaaagctgcgggaaatgctcatttgtacaaatatggaggacctgcgagagcagacccataccaggcactatgagctttacaggcgctgcaaactggaggaaatgggctttacagatgtgggcccagaaaacaagccagtcagtgttcaagagacctatgaagccaaaagacatgagttccatggtgaacgtcagaggaaggaagaagaaatgaaacagatgtttgtgcagcgagtaaaggagaaagaagccatattgaaagaagctgagagagagctacaggccaaatttgagcaccttaagagacttcaccaagaagagagaatgaagcttgaagaaaagagaagacttttggaagaagaaataattgctttctctaaaaagaaagctacctccgagatatttcacagccagtcctttctggcaacaggcagcaacctgaggaaggacaaggaccgtaagaactccaattttttgtaaaacagaagttccagagcacagaaggtcatcatcacaagcaaactttattaaaaaaaaactagaagtgtgctttgattttgctgttatttgttttatcacttctatatttggtgaacagccacagttactgatatttatggaaaagtactttcaagtacaaggtcaatacataagccagagtgaatgatactacaagttgagcatctctaattcaaaaatctgaaatccagaagcttcaaaatctgaatctttttgagcactgacttgaccccacaagtggaaaattccccacccgacacctttgctttctgatggttcagtttaaacagattttgtttcttgcacaaaatttttgtataaattactttcaggctatatgtataaggtggatgtgaaacatgaattatgtaattagagtcgggtcccgttgtgtatatgcagatattccaaacctgaaatccaaaacacttctggtccctagcattttggataagggatacctcagcttggtacctatatattcatatatattcactgttgttagaaatgtttaagttgctgttctgtgatgaatctaaatcttttctcttgctaccaagctattgtcactgcagtgcattataccaaagagcgaagtcagtgccactgaaaatacagaacccattaatatcgtggctatctgattacatttatattccaagatgaaccttttttatatatgctaaaaattttggggaatatgttttgggatgtattatggagctaaaactctaacctcttaatagttttatagaacttaaaaattttttatacaattacccaattggtgatatgatcttaagcttttgtgtcagattatttaatatgatgacttcatgctttattatgccttattatggctgacgtattactgtggtgaaacaaaatatctttaaaagttaaaacatccagatatataagctattttttcctaaggataaagtacctttgagcatgagtgtatcacagctttcattaggaaaacttttcattacatacttgtttaaactctgtcttccagggtaaaaataataaggttgaatcattttattaaaaatactttttaagaaaataactatgaacatctgaatattaaagatataaaaatgcacataattcatatttcaggtggtatttgcattcagtgccttactggtattctcagaacattttaatgatttctaacatttcttaacagtcatagatatatacattttcattttttgtacttgaatattctaaataaaactgacatttactcttgacaaataaaacatatatttactaaaaaaaaaaaaaaaa

SEQ ID NO: 149 - DNA, 359 bp, Homo sapiens
  misc_feature (1): n equals a,t,g, or c
  misc_feature (31): n equals a,t,g, or c
  misc_feature (355): n equals a,t,g, or c
ngccgtcctcaacgtgtccgccagctgcccnaaccactttaagggccttttccgctacaagagtatccctgtggaggacaaccagatggtggagatcagtgcctggttccaggaggccakaggcttcattggtaagggggcacctctgcccagaaatcccgaggggctccagaggagaggactgggggcacctgtytcctgggctgtgcacattccgtctgacaccactcccccatctcccttgcagaytgggtgkaagaacagcggaggccgggtgctggtgcamtgccaggcgggtatctcgcgytctgccaccatctgtctggcatacctcatgcagagtcgccgtgtgcgnttgg

SEQ ID NO: 150 - DNA, 1134 bp, Homo sapiens
ggcacgagggaattcgccaccgagggcactgaccgcaaggacgtctttttctaccaggcagacgatgagcactacatcccccgggccgtgctgctggacttggaaccccgggtgatccactccatcctcaactccccctatgccaagctctacaacccagagaacatctacctgtcggaacatggaggaggagctggcaacaactgggccagcggattctcccagggtgagaaaattcatgaagacatctttgacatcatagaccgagaagcagatggaagtgacagtttggagctccagaacagctccagagtgataaagggcttcgtgctgtgtcactccatcgctgggggtacgggttctggcctgggctcctacctcctggagcgactgaatgacaggtaccccaagaagctagtgcagacttattcagtgtttccctaccaggacgagatgagcgacgtagtggttcagccctacaattcactcctgacactcaagaggctgacgcagaacgcagattgtgtggtggtgctggacaacacagccctgaaccggattgccacagaccgcctgcacatccagaacccgtccttctcccagatcaaccagctggtgtccaccatcatgtcggccagcaccaccaccctgcgctaccccggctacatgaacaatgacctcatcggcctcatcgcctcgctcattcccaccccacggctccacttcctcatgaccggctacaccccgctcactacagaccagtcagtggccagcgtgaggaagaccacggtcctggatgtcatgaggcggctgctgcagcccaagaacgtgatggtgtccacaggccgagaccgccagaccaaccactgctacatcgccatcctcaacatcatccagggagaggtggaccccacccaggtccacaagagcctgcagaggatccgggaacggaagttggccaacttcatcccgtggggccccgccagcatccaggtggccctgtcgaggaagtctccctacctgccctcggcccaccgggtcagcgggctcatgatggccaaccacaccagcatctcctcgctctttgaaagttcctgccagcagtttgacaagctgcggaagcgggatgccttc

SEQ ID NO: 151 - DNA, 944 bp, Homo sapiens
tcgacccacgcgtccgcggacgcgtgggcgcgagcgcgggggccgacgggtcgccgctgcgccgggccgggatggcggccaccgcgctgctggaggccggcctggcgcgggtgctcttctacccgacgctgctctacaccctgttccgcgggaaggtgccgggtcgggcgcaccgggactggtaccaccgcatcgaccccaccgtgctgctgggcgcgctgccgttgcggagcttgacgcgccagctggtacaggacgagaacgtgcgcggggtgatcaccatgaacgaggagtacgagacgaggttcctgtgcaactcttcacaggagtggaagagactaggagtcgagcagctgcggctcagcacagtagacatgactgggatccccaccttggacaacctccagaagggagtccaatttgctctcaagtaccagtcgctgggccagtgtgtttacgtgcattgtaaggctgggcgctccaggagtgccactatggtggcagcatacctgattcaggtgcacaaatggagtccagaggaggctgtaagagccatcgccaagatccggtcatacatccacatcaggcctggccagctggatgttcttaaagagttccacaagcagattactgcacgggcaacaaaggatgggacttttgtcatttcaaagacatgatgtatggggattagaaagaactcaagacactcctgcttgatacagaacaaaaagagcttaacaggaccaacagggcttaagcccagacttgacgtaacagaaatgtgccaataggtaataggtaatttttctttctctgacttgttttgttttcttgaaataacactgttgtgtggctagaaaaaaaaaaaaaaaaaaaaaaaaaaaaaaaaaaaaaaaaaaaaaaaaaaaaaaaaaaaaaaaaaaaaaaaaaaaaaaaaaaaaaaa

SEQ ID NO: 152 - DNA, 1453 bp, Homo sapiens
ctgatacccaggagtctccagcttccaagagaggtcgggtcacagccagcagctatgtctgacataaatcttgactgggttgacaggcgtcagttgcagcgcttggaggaaatgctgattgttgtggatgagaatgataaggttattggtgccgacaccaagaggaattgccatctgaacgaaaacattgagaaagggctgctgcaccgagccttcagcgttgtcttgtttaacaccaagaatcgaatcctgatacagcagaggtcggacacgaaagtcacgtttcctgggtattttaccgactcctgtagtagccacccattatacaacccagcagaactggaagaaaaggatgccatcggagtgaggagggcagcccagaggcgtctgcaagcagagctgggaattcctggggagcagatttctccagaggacattgtgttcatgacaatctatcaccacaaggcaaaatcagacagaatttggggagagcatgaaatttgttaccttctgcttgtgaggaaaaacgtcactctgaacccggatcccagtgaaacgaaaagcatcctctacctgtcccaggaggagctgtgggagctgctggagagggaggcgaggggtgaagtcaaagtcaccccctggctaagaaccattgccgagaggtttctgtaccggtggtggcctcacctggatgacgtgaccccgtttgtggagcttcacaaaatacacagagtgtgagaggcagggaggtcgagtcagccatgtgtaatgccctcagtgcaggcagamgcaccattgaggcaatgatacaccctctccaaaaaacagggcaaaaggggcacttgattgcccatcatgtataaatcactatttcaaccttttcatcaactttgtcatatcttcattttcccttttccttatttccatatttctcatctgcctggttgcagggaggaaatttaacatttcctttgtcccaatttccattttataagcacttgttygattaacagcagctgatcctgaaagtcttggggagatcttgagagtcctgaagcaggcagactagcctggctggaccatgaggctgtctccccacagctttatccaagcctccaaggtcaggatgggatctctgtatcatgtttttctttttaaatcacttatttcagagtgcaacacaaggctgcatttttaaaaaaaagacacattcaatcttgcatcctaatacaagcagtacggaagatgcgtatgrtctcagccaagtgactcgacgtttatccacttctgttcatttgatcgtttcagtaatatgcttacaaataaagacatacttgctttaaaacatactgttgttgtttaacacaaagtaaactatatgttaagttttggtgtttaatacrgagaaagaatttcaaaaaccagacctggtatttttttttttttttttgag

SEQ ID NO: 153 - DNA, 1896 bp, Homo sapiens
  misc_feature (1718): n equals a,t,g, or c
  misc_feature (1832): n equals a,t,g, or c
  misc_feature (1859): n equals a,t,g, or c
  misc_feature (1871): n equals a,t,g, or c
  misc_feature (1887): n equals a,t,g, or c
aaactgtagtaaaaatgagaaaaggctagaagaacagaatgaggaaatgatgaagaaggttttagcacagtatgatgagaaagcccagagctttgaggaagtgaagaagaagaagatggagttcctgcatgagcagatggtccactttctgcagagcatggacactgccaaagacaccctggagaccatcgtgagagaagcagaggagcttgatgaggccgtcttcctgacttcgtttgaggaaatcaatgaaaggttgctttctgcaatggagagcactgcttctttagagaaaatgcctgctgcgttttcccttttcgaacattatgatgacagctcggcaagaagtgaccagatgttaaaacaagtggctgttccacagctcctagattagaacctcaggaaccaaattctgccaccagcacaacaattgcagtttactggagcatgaacaaggaagatgtcattgattcatttcaggtttactgcatggaggagccacaagatgatcaagaagtaaatgagttggtagaagaatacagactgacagtgaaagaaagctactgcatttttgaagatctggaacctgaccgatgctatcaagtgtgggtgatggctgtgaacttcactggatgtagcctgcccagtgaaagggccatctttaggacagcaccctccacccctgtgatccgcgctgaggactgtactgtgtgttggaacacagccactatccgatggcggcccaccaccccagaggccacggagacctacactctggagtactgcagacagcactctcctgagggagagggcctcagatctttctctggaatcaaaggactccagctgaaagttaacctccaacccaatgataactactttttctatgtgagggccatcaatgcatttgggacaagtgaacagagtgaagctgctctcatctccaccagaggaaccagatttctcttgttgagagaaacagctcatcctgctctacacatttcctcaagtgggacagtgatcagctttggtgagaggagacggctgacggaaatcccgtcagtgctgggtgaggagctgccttcctgtggccagcattactgggaaaccacagtcacagactgcccagcatatcgactcggcatctgctccagctcggctgtgcaggcaggtgccctaggacaaggggagacctcatggtacatgcactgctctgagccacagagatacacatttttctacagtggtattgtgagtgatgttcatgtgactgagcgtccagccagagtgggcatcctgctggactacaacaaccagagacttatcttcatcaacgcagagagcgagcagttgctcttcatcatcaggcacaggtttaatgagggtgtccaccctgcctttgccctggagaaacctggaaaatgtactttgcacctggggatagagcccccggattctgtaaggcacaagtgatccttggctttcagaatttgcaagaacagcgatttgaattttgggggggtctgctgttcattcctttaggtgctatacattattcaaaaagtctcccgcgcatttgcactaatgatggctgcatgcatagcaatcagcatgtgagcaaaatcgacaagaaaaccttgactttacagagcagtgtgtgagtaaacagaatgaaaacaacaacctccactctttagtttatataagtttgagttctntcctaaattaaaagatctacacttgagttgggaaccgaaagagaaaaatggacttccatctgttttactggtaaaggaaatcctctgatggacaggttcagaattgaaaggaangttgttgctgggtaaaaaactctctgnacaaaaaaaccnttgggaatgctttccnccaaaaatg

SEQ ID NO: 154 - DNA, 2678 bp, Homo sapiens
  misc_feature (2535): n equals a,t,g, or c
  misc_feature (2628): n equals a,t,g, or c
  misc_feature (2638): n equals a,t,g, or c
  misc_feature (2669): n equals a,t,g, or c
cggtctctcagagccgcacactccgcggagctcctgccacagccgtcgccttcgcggcggctctccagccccgcgcctcagcctcggcgccgcatcaccgcgtcccaggcctccttccctccctctgccactccccctccctttcccgctcttcttgcccacccggccggcagagagagcctggatacgaagcaggcgggcttcagagtgggttggaaaaatggaggtgccgcgcctggatcatgccctcaacagccccaccagcccctgtgaggaggtgatcaaaaacctcagcctggaggccattcagctgtgcgaccgggacgggaacaaatcacaagacagtggcatagcagagatggaagaacttcctgtaccacataacatcaaaataagcaatataacgtgtgactcattcaagatttcatgggaaatggattcaaaatcaaaggatcgcattacacactattttattgacctcaacaagaaagagaacaagaactccaataaatttaaacacaaggatgttcccacaaaattggtggcaaaagctgttcccttgcctatgactgtccgtggacactggtttttaagcccaagaactgaatatacagtagcagtgcagactgcctcaaaacaagttgatggtgattatgttgtgtctgaatggagtgaaattatagaattctgcaccgcagactattcaaaagttcatctaacacaattgttggagaaggctgaagtgattgcaggacgcatgcttaagttttctgttttttatcgtaatcagcacaaagaatattttgactatgttcgagaacatcatgggaatgctatgcagccatctgtcaaggataacagtggtagccatggctctcctatcagtggaaaattagaaggcatcttcttcagctgcagcactgaattcaatactggaaagccaccccaggattcaccttatggaagatacaggtttgagattgccgcagaaaaactttttaaccccaatactaacttatactttggggacttctactgtatgtacactgcttatcattatgtgattcttgttattgctcctgtgggatcaccaggagatgaattttgtaagcagcgccttcctcaactaaattctaaggataataaatttttgacctgtacagaagaagatggggtgctggtttaccaccatgcccaggatgtcattttagaagtcatttacactgaccctgtggatctttctctgggcaccgtggcagaaatcactggtcatcagctcatgagtttgtctactgcaaatgcaaagaaagatcccagctgcaaaacctgtaatatcagtgttggacgttaatgcccacttttcttattcttactcagccccttttcctcccttaggagcattggtcctctgttgtccatttttatcaccagatgttttccactgaagcatgcacatgccactgtcaccaaaacaaacaactaccactttccaaatttcattcagaaccattttagtgttttcctattccctacccctcccactactttcaatgatgaaataccctaagttaagttctccttttgacactttattgcctagatgctgcaatgtttttatgtttcctttatgccaaacataacaaaacagttatatagactgctttagcaaagtacacaataatggcttataaatggtgtttaaatatgcattcattttaatctactgaacaaatattgggataactccaaaccgcatgaaagggtgtaattgcagcatgagttaaatcttgaagcctagaattgtcagcacttccaacttcttgtttgacagtgttatttatgttatttatattagctaacaggaaacaactactgtgtttcaacataataaatataatagaaaaatattttatttgtattgttgtataaaatatttacaatcatatagaatatatagagttacattttaatagcaactgtgtacatgtcacgaaaccatttcccttatcaaagatgtaatttgtaaacctcaaatagttgtgtatctgtcctgttagaagtagatgacttcaattaaacaaatttatgaaggacattattctgattcataaaagttataaaatattaggtaaatacagagaaaacaataagcctctgaaataagtctgtttctgaaatagtcaatagtcttcccatccaaactataagagaatgtgaatttcttcaacatcatacttaaacattacagaaaatagaaatacaaacaaggttggtacatgagagaaaatgttgaccttttacttccttttacaaaaatgaaaataataaacatgttttcgtataaaataacacaaaatgatatacactgaagttgatgaagcaaataaatattctggcttctttttcaaggtatcagggcaaacaatttccaaacttttcattttgtacagaaggatgaataactacagctcatggggaaatgttttgactttacaaagtatagatgttgggaacattaaggaaaaatgtatattncccaatggaaaaaatagttattatccatcttataggtaaaccaaaaggattaggccattaatactttggggccactttgggtttttatacctnccgggccccntttcctttccccaattaccccttttttaaanttttttatt

SEQ ID NO: 155 - DNA, 376 bp, Homo sapiens
  misc_feature (174): n equals a,t,g, or c
  misc_feature (366): n equals a,t,g, or c
  misc_feature (370): n equals a,t,g, or c
tcgacccacgcgtccgcctgacgaaaaagagggttacgctgctcattttgagtatctgggccatcgccatctttatgggggctgtccccaccctgggctggaattgcctctgtgacatctctgcctgctcttccctggcccccatttatagcaggagttacctcattttctggnacagtgtccaaccttgtgggcctttttcatcatggttgtggtgtacctggcggatctacatgtatgtcaagaggaaaaccaatgttttgtgctccacatacgagtgggtccatcagccgccggaagacacccatgtaagctggatgtaagacagtggatggactgtattgaggggacctttgttcgtgtggntggnacccca

SEQ ID NO: 156 - DNA, 1608 bp, Homo sapiens
  misc_feature (1049): n equals a,t,g, or c
  misc_feature (1550): n equals a,t,g, or c
  misc_feature (1591): n equals a,t,g, or c
ggctggctgccagcgggacgccggcgagcagagcgcagccgcgagggaggcgcgagggaggcgagccggagcccgagcactagcagcagccggagtcggcgtaaagcacccgggcgcagccggagccggtgccgcagctgcgatggccgtggccgtggggagaccgtctaatgaagagcttcgaaacttgtctttgtctggccatgtgggatttgacagcctccctgaccagctggtcaacaagtctacttctcaaggattctgtttcaacatcctttgtgttggtgagacaggcattggcaaatccacgttaatggacactttgttcaacaccaaatttgaaagtgacccagctactcacaatgaaccaggtgttcggttaaaagccagaagttatgagcttcaggaaagcaatgtacggctgaagttaaccattgttgacaccgtgggatttggagaccagataaataaagatgacagctataagccgatagtagaatatattgatgcccagttcgargcctacctgcaagaggaattgaagattaaacgttctctcttcaactaccatgacacgaggatccatgcctgcctctactttattgcccctactggacattcactaaagtccctggatctggtcaccatgaaaaagctggacagtaaggtgaacatcattccaataattgcaaaagctgacaccattgccaagaatgaactgcacaaattcaagagtaagatcatgagtgaactggtcagcaatggggtccagatatatcagtttcccactgatgaagaaacggtggcagagattaacgcaacaatgagtgtccatctcccatttgcagtggttggcagcaccgaagaggtgaagattggcaacaagatggcaaaggccaggcagtacccctggggtgtggtgcaggttgagaatgaaaatcattgcgattttgtgaaacttcgagagatgctgatccgcgtgaacatggaggacttgcgagagcagactcacacccgccactatgaattgtaccgacgctgtaacttgnaagagatggggttcaaggacactraccctgacagcaaacccttcagtcttcaggagacatatgaagcaaaaaggaatgaattcctgggagaactgcagaagaaagaagaagaaatgagacaaatgtttgttatgagagtgaaggagaaagaagctgaacttaaggaggcagagaaagagcttcacgagaagtttgaccttctaaagcggacacaccaagaagaaaagaagaaagtggaagacaagaagaaggagcttgaggaggaggtgaacaacttccagaagaagaaagcagcggctcagttactacagtcccaggcccagcaatctggggcccagcaaaccaagaaagacaaggataagaaaaatgcaagcttcacataaagcctggcaagccaaggatgttcccgcattcacctgcttttgcagtaatatcgtatctctgccatgtgtgttctttagttctattttattttattttatctttttacccttcctcaancaccagtaactattattaactcgatttgctgaatgttgttnggtggtagaaaatgata

SEQ ID NO: 157 - DNA, 454 bp, Homo sapiens
  misc_feature (368): n equals a,t,g, or c
  misc_feature (398): n equals a,t,g, or c
  misc_feature (448): n equals a,t,g, or c
gatcacaaagaaaatctttaagtcccaccttaagtcaagtcggaattccacttcggtcaaaaagaaatctagccgcaacatattcagcatcgtgtttgtgttttttgtctgttttgtaccttaccatattgccagaatcccctacacaaagagtcagaccgaagctcattacagctgccagtcaaaagaaatcttgcggtatatgaaagaattcactctgctactatctgctgcaaatgtatgcttggaccctattatttatttctttctatgccagccgtttagggaaatcttatgtaagaaattgcacattccattaaaagctcagaatgacctagacatttccagaatcaaaagaggaaatacancacttgaaagcacagatactttggtgagtnctaccctcttccaaagaaagaccacgtgtgcatgttgtcatcttcaattncataac

SEQ ID NO: 158 - DNA, 2648 bp, Homo sapiens
gcccacgcgtccgcccacgcgtccgtggctgtgctggtggcgttcaagatgtcgaccaagaatttccgagtcagtgacggggactggatttgccctgacaaaaaatgtggaaatgtaaactttgctagaagaaccagctgtaatcgatgtggtcgggagaaaacaactgaggccaagatgatgaaagctgggggcactgaaataggaaagacacttgcagaaaagagccgaggcctatttagtgctaatgactggcaatgtaaaacttgcagcaatgtgaattgggccagaagatcagagtgtaatatgtgtaatactccaaagtatgctaaattagaagaaagaacaggatatggtggtggttttaatgaaagagaaaatgttgaatatatagaaagagaagaatctgatggtgaatatgatgagtttggacgtaaaaagaaaaaatacagagggaaagcagttggtcctgcatctatattaaaggaagttgaagataaagaatcagagggagaagaagaggatgaggatgaagatctttctaaatataagtyagatgaggatgaggatgaagatgacgctgatctctcaaaatataatcttgatgccagtgaagaagaagatagtaataaaaagaaatctaatagacgaagtcgctcaaagtctcgatcttcacattcacgatcttcatcacgctcatcctccccctcaagttcaaggtctaggtccaggtaaacgggtacaggtcaagggtaacaccagtcaaaatgtcagtatctaacttttttatttataaattttgtttttcttgacgaaataaactttcctttttattttaaaaatttaattcaaatcaacttttaaaataatttttcagcttagtaccatacagttgttgtccagtatttttagaaaagtaaagtcttagcatgaaacttccttaacctattttagcctcatgcttttgactaaaatagacttaaaaactgaattaaatttttatatacacttatatttaattaatctaaagagatagcttacatatagaaattaagtaaaggggagatctgtattttcattcaagatgttaaaggctagcacagaaattttctaggcattaaatcattgcttattacataatgtttttaatagtttgctttgatatcagtattgtgaataacggagcaaattcagccatattagttctgttgacttcatgctcataattttgagaagtccaggcgtaaactaaaactcttttggtgtacttgaatattctttgtttgttgatgtaaaatatgtaatctctgattttatagttaacaataaaaataaaattttaggtgagtgaaagcagtgatttaaatttaacagtgtcctcttgaaaaaccttaatcacagttaagtgatggcatgggcaatgaattttaatcatatttaggaataaaatactagatattagtgtataacaattagatatatgttaattgagcactacaaagcctgaaagcttaacaaagtggggctataactagtaattttttggtaaaaatatagtgatctttttctacagggtattattataagggacaaattatagttgtaaattagattaatgaattttgtgagttttaaaatttgtacgaaccatgtctcccttgtgtcatattttccaataatataattacctaacaatgacagaattatacattttccctttaattctctaagcattgagtaaacagaaaaatatagggatgaaatacacacatgccaacattcaaaactttgtactaactagaaacaaaaatagaaggggatttataaaggaaaatgatggagacattttagagaaattaagtataaatcgcaacattctgttttcttggatgtattctgggtagcttctagttacttgtaaacaaagtattcattgtttttgtaataaagtgataatgttttgttttatagttgagtggctttagggtaatttaatcacctggaaagtgatatttttttaattaccttttgttactaaatcttatctaatttaaaatactatgttttgaaagtatatatcttgtatagttatctttttatatgaaaatgaactctaatacatatctttctttcagtgttcatatcacaaagctcaattaaatggtcctggaaaaaaaaaatcgttccatgttgttccaggtcccgttcaagaagttcttccagttcgcagtcaagatctcgttccagttccagagaacgttcgagatctcgtgggtcgaaatcaaggtgaatgaggtagcatctctctgtaaagcagagagaaaaatatttaaaggctgcagaaggtgttgctgctttttttccccttattttgcttctacttgtcgattttattttagcattagaaaactaatgcacttgcctcagcttaattttctcaccatgaaatgtttccattgccagcagtgtgccaagacattcccatgattgaaatcaggtggctattttgcaatatgcagcgtttattattttggcactaagatgttatgaagtaggaagatgaagccaagtcttatcgccacatctctagkatattaagattatatatggccaggcacagtgattcatgcctataaatcccagcactt

SEQ ID NO: 159 - DNA, 535 bp, Homo sapiens
  misc_feature (452): n equals a,t,g, or c
  misc_feature (499): n equals a,t,g, or c
caactatgagcgctggcacaagcagcggagagtcatagacctggccttcagccggagctccttggttagcttaatggaaacattcaacgagaaggctgagcagctggtggagattctagaagccaaggcagatgggcagaccccagtgtccatgcaggacatgctgacctacaccgccatggacatcctggccaaggcagcttttgggatggagaccagtatgctgctgggtgcccagaagcctctgtcccaggcagtgaaacttatgttggagggaatcactgcgtcccgcaacactctggcaaagttcctgccagggaagaggaagcagctccgggaggtccgggagagcattcgcttcctgcgccaggtgggcagggactgggtccagcgccgccgggaagccctgaagaggggcgaggaggttcctgccgacatcctcacacagattntgaaagctgaagagggagcccaggacgacgagggtctgctggacaanttcgtcaccttcttcattgctggtcacgagacctct

SEQ ID NO: 160 - DNA, 638 bp, Homo sapiens
ggcacgagcccatccccacccgggtctgcaaggtcagtgaccttcatgaaggccacttctatgagttccgtgcccgggctgccaactgggcaggtgttggcgagctgtcggcacccagcagcctgtttgagtgcaaagagtggacaatgccccagccaggccccccgtacgatgtacgggcatccgaggtgcgggctacatccctggtgctgcagtgggaacccccactgtatatgggggctgggcctgtcacaggctatcacgtcagtttccaggaggaaggctctgagcagtggaagccggtcaccccaggccccatctctggcacccacctgagggtttccgacttgcagccaggaaagagttacgtgttccaggtacaggccatgaattcagctggtctggggcaaccgtccatgcccactgatcccgtgctcctggaggacaagccaggtgcccatgagatcgaggttggtgtggatgaagagggctttatctatttggcttttgaagcccctgaagcccccgactcctcagagtttcagtggtccaaagactacaagggcccactggacccccagagggtcaagatcgaggataaagttaacaagtccaaggtcatcctgaaagaacccggc

SEQ ID NO: 161 - DNA, 1289 bp, Homo sapiens
gcggccgccctttttttttttttttttttttttttttttaactgttctctagaaatatatttattcatgcaaacatgtctaagtcactctacgtatttttatacaacataagattgtttatgatcttatgaccatttttgtttatttttaatttttttgccagagagggctttcagtaaatgttttatttagaacattctttgaaaaatttgaagtgcaaagccacaaaaagcaatggatttaaatatataatgcgtagtagagttaggattatcacactagctctttttaaatctcactgctgttagtagtttcttttaattcttccatcactaattcctgttggggtttttcagcacttttcctataaagcaaggtttccccatgagggttttgaaatgtagattcctggacaagctgattagatgtgtttatgagcacatggcttttagcttttagggcataagcttccataggctttgctcttttttggcagagctggagctggaaagcttcttggaaaccacggcggaaattctcgttgaagaaaccataaatgatgggattgacactgctgttgccgaatgccagccagtgtgcaaaagggtagatgtagatgttgatgatctgcagttcatttggagaaaggtcagcgtagtctgagagcatcattagagtccacaggggcagccatgagagaataaaaagcagggccacaatcaggagcatcttaatgatcttctgcttcttcctggacaccacgtgccactgctcctggttcttcctgcctgtgtgaggaactgcagccctgaagagtgaaattccaatccttccatacatgatgacaatgagggagaggggagccaggtagatgttggcaaacagcacagtggtgtagatcttcctcatttcctgatttggccagtcttcccggcaccagtagactggactggttttattctgggagttgagtctcactcggtaatatttttcttcttgcacatgtaacattactgcagatggagacataatggtgatggctaggacccagatgatcataataatgacaaacgctgtcttgatagtgagctttggtttaaaagggtagaccacacactggaacctatctacagcaattgcaactaacgtaaagactgaagctgcgacagatattccctggaccaatccactgatcttgcacatcgtgtttccaaatggccatcctgctataatattgtccagcagtgttataggcatgcagaatatgccaactagtaaatcacttatgc

SEQ ID NO: 162 - DNA, 1057 bp, Homo sapiens
tttttttttttttttttttttttttttttttttttttttttkwtttccaccatttacattgttttatattgatataacctagagaatgttccaggttaccctatagaggcagtgctcttgcttgtttacatgccaaagtgctctgtggaagaggtgacgaaagggtggcatccctgggtaagtaagtgcctatgaagaagtagcccaaccaatggctttgcagcacacaatgtcccagtggggaaactgagggccagagaggggaagggacatgtccaaggtcacatggtgatgggacacccagggctgggccactggtccgtgcctgacctccagtgggtctgccagccaagggtgaggaaggctgtggggaggggaggtggccaagtcaggcttccccctccacctcgtcctcgctggcacagccctcggacacagctctgcgccgggatgcccgcctctccaggtactctgccttaagctgctccagctcccgcagctcagcctccagccgctcccggtggaccatgcgcagctgccgcagctgtttcatgcggaaggggttcatgtcattgaaggcgatgttcatcagcttccggctgttggagatggtcttggtgaagaagcgcaggtactggtagatttccaggccattctgtagcctcaagatctccttctcgttgtacttgaaaatggccaaggcatagcgaaacaccaccttcgtcccctcgtacaggaaggcatcccagacccgaaggaggatgttgctaatgagactgtccgcaaagaccacgaggaaccagttgaaggtgacgagggagagatccacgtggtgctgccccagatgggccatcagcctgggcagcttctccgagagcaggtcctggagcacccgctggtccacctgggatgccgtcagcgtgttgcagtagtaatcagcgggcatgatggtctccacaatggccaccaggcaccagaaggcgctctcctcctcctctaggaccagcagggcaatggccgccagcctgttcaggccctggcagtagccgatggtggc

SEQ ID NO: 163 - DNA, 781 bp, Homo sapiens
  misc_feature (762): n equals a,t,g, or c
  misc_feature (769): n equals a,t,g, or c
gcccacgcgtccgtggatggcagaccccaccgggctggcagggtcctccagactggcaaggtcctcctgactggccgctaccacccgactggccactgccacctgattggccacttcccactgactggccactaccacctgactggatccccgctgattggccaattccacctgactggcagaacctgcgcccctcgcctaacctgcgcccttctcccaactcgcgtgcctcacagaacccaggtgctgcacagccccgagatgtggcccttcttcaggaaagagcaaataagttggtcaagtacttgatgcttaaggactacacaaaggtgcccatcaagcgctcagaaatgctgagagatatcatccgtgaatacactgatgtttatccagaaatcattgaacgtgcatgctttgtcctagagaagaaatttgggattcaactgaaagaaattgacaaagaagaacacctgtatattctcatcagtacccccgagtccctggctggcatactgggaacgaccaaagacacacccaagctcggtctcctcttggtgattctgggtgtcatcttcatgaatggcaaccgtgccagtgagggtgartggctggacctgcagctgggggttggccacagcctggatttccatgcttawtttccgtcccttgkctccccttgsctcccattgcagcttgtcctytgggaggcactacgscaagatgggactgcgtcctggggtattgattgggttttctcaactntttgccngttttgtggcca

SEQ ID NO: 164 - DNA, 648 bp, Homo sapiens
  misc_feature (297): n equals a,t,g, or c
ggatgcatcagaatggagactacacccacttctacttctgttatcgctggttcctgctggattttaagagagaactgctgtatgaggatgtgtttgctgtgtgggaggtgatctgggcagccaggcacatctcatcggagcactttgtcctgttcatcgccctcgccctggtggaggcctaccgagagatcatccgtgacaacaacatggacttcactgacattattcagttttttcaatgaacgtgctgagcatcacgatgcccaggagatcctgcggattgcccgggacctcgtncacaaggtacttccctgaaaaccacgtgtaagaagtgatgcttttgccagtggatgatctggaatgcgaccggagcacttgctctgagkaatcccagggtgactctgtcggggaagawtccggtcacagcctcccctcagagacaggcctcagttcgagggcagcccattatctgtcgcagaatctgccatgtcctgagactgcgggagcarggggatgcatgggtgtccccatctgtccctggtgaraarcaaggctagcttctgscttycacatgcttytcaggatgccaagaggctaggaaccccagaaacccccttgggaggagctgtgtatgcggggggtgccagg

SEQ ID NO: 165 - DNA, 634 bp, Homo sapiens
  misc_feature (624): n equals a,t,g, or c
ggctggctgccagcgggacgccggcgagcagagcgcagccgcgagggaggcgcgagggaggcgagccggagcccgagcactagcagcagccggagtcggcgtaaagcacccgggcgcagccggagccggtgccgcagctgcgatggccgtggccgtggggagaccgtctaatgaagagcttcgaaacttgtctttgtctggccatgtgggatttgacagcctccctgaccagctggtcaacaagtctacttctcaaggattctgtttcaacatcctttgtgttggtgagacaggcattggcaaatccacgttaatggacactttgttcaacaccaaatttgaaagtgacccagctactcacaatgaaccaggtgttcggttaaaagccagaagttatgagcttcaggaaagcaatgtacggctgaagttaaccattgttgacaccgtgggatttggagaccagataaataaagatgacagctataagccgatagtagaatatattgatgcycagttcgaagcctacctgcaagaagaattgaaagattaaacgttctctcttcmactaccatgacacgaaggatccatgcctgcctctactttattgcccctacttggacttcnctaaaatccc

SEQ ID NO: 166 - DNA, 1431 bp, Homo sapiens
tcgacccacgcgtccgaatttgaggagattgtccagattgttctgcagaagtcccttcaggagtgcttgggtcaatgtctggtctgggtccagtgttccttcccaaactgtgggaaatggaggcggctgtgtgggaacattgacccctcagttctcccagataattggtcctgtgatcagaacacagatgtgcagtataatcgctgtgatattcctgaggagacctggacagggcttgagagtgatgtggcctatgcctcctacatcccaggatccatcatctgggccaagcaatacggttacccctggtggccaggcatgatagaatctgatcctgacttaggggaatattttctttttacttcccatcttgattccctgccgtctaagtaccatgtgacgttttttggagaaacagtttctcgtgcatggatcccagtcaacatgctaaagaacttccaggagctgtccctggagctatcagtcatgaaaaagcgcagaaatgactgcagccagaaactgggggtggccctgatgatggctcaagaggcagaacagatcagcattcaggaacgggttaacttgtttggtttctggagccgattcaacggatctaacagtaatggggaaagaaaagacttacagctctctggtttgaacagcccaggatcctgcttagagaaaaaggagaaagaggaagagttggaaaaggaggaaggagagaaaacagacccaattttgcccattcgtaagcgagtcaaaatacagacccaaaaaaccaagccaagagggcttgggggtgatgcaggcacagcagatggccgaggcaggacactgcagaggaagataatgaagagatctctaggcaggaaatccacagctcctcctgcacccagaatgggaaggaaagaaggccaagggaattcagattctgaccagccaggccctaagaaaaaatttaaagctccccagagcaaggccttggcagccagcttttcagagggaaaagaagttagaacagtgccaaagaacctgggcctatcagcgtgtaagggggcctgcccctcatctgcgaaagaagagcccagacaccgggaacccctgacccaggaggctggaagtgtcccccttgaggacgaagcctccagtgacctggacctggagcaactcatggaagatgttgggagagagctggggcagagcggggagctgcagcacagcaacagtgatggcgaggacttccccgtggcgctgtttgggaagtagctggtgctcctctgctccctctttttctcccttctctggggcgcaggagggagaagttgctaagtgctgggtctgttcattggctatgaggttcaaatgtgtgtggtgcagtttctgtgttaataaagcaggttacagtcgccaaaaaaaaaaaaaaaaaaaaaa

SEQ ID NO: 167 - DNA, 2727 bp, Homo sapiens
  misc_feature (5): n equals a,t,g, or c
  misc_feature (149): n equals a,t,g, or c
gtatntgggcgtttatcttgtacccggcaagatgtgggttatgtccagggcatgtccttcatagcagcagtgttgatcttgaccttagatacgcagatgcttttatgccttttctacyttctgaataaccctgtcaaatggmgtttttnagagtggaccatggccttatgttgacttattttgctgcatttgaagtattctttgaagaaaatttgccgaaattatgtgcgcatttcaagaagaacaacctaactccagatatctacctaattgattggatctttaccttatatagtaaatctctgcccctcgacctggcctgtcgtatctgggacgtgttctgtcgcgatggggaagagttcctgttccgcacggccctgggcatcctgaagctgttcgaggacatcctgaccaagatggacttcattcacatggcccagttcctgacccggctgcccgaggacctgcccgccgaggagctgtttgcctccatcgccacgatccagatgcagagccgaaacaagaagtgggctcaggtactgactgcattgcagaaagacagccgggaaatggagaagggaagtccgtccctccgacactgaggctgcagcgggaattcgcactcggcaccaatcagagccccatgccgcggcccctctgttgtttcagactgacacccgggcagccgagaagaacagacgctctttaagtttgattcctaacactggagttggccttaaacaaaacaaacacaaaaacttttaaagaattaaaccaaggcttagccttaagcagctcagtggaaggatgagctgctgcggaccacagccagccactgcatctgctgcacagttgaacgatgggcagtggctcacccccactcctttatttcagcaaaagctaattaaattgtaatgtttctatgtcaactactgggaagtatgttacagtcttagccaggatgcatgagagatgttatttgggagacttgagatgctttggctgatatttacatgttttcgataagaaagggatcgctgattgakttattgagatagtttttccagagctggaggtcacgtttctaaaactcacctacgaaagatagcattaaaggaacaggggctctctgaggatggccactgatgtgtgtktgtggatacctgggcatcgacccagcctgcaggtgagctctgggccatgttgccttgacacagtcacagtgtmkggmwgcagggcmcacgtggcggtccgctggcaggctggtyctgkggagcattctgcggacccggtcacgggcttggttagtcatgcgtacatgtgtgccttggggtgctctgcactccacggcccttctcagccacacttcccaccccagggggtgcccccaggctgatctcatttctgatgttgagggctgtttggctctgtctgtatagcttgtaacaggagccttgggctaggggctggggaaggaaagccgagctggcattcgttctctggactttttatgcctgccataccygctaatgctcctcgaggtgcaggagcaggttgctgagccagtggctgccccgtgccctccttcccagcactatcatgtgtcacgtttcccggactctgcccctacatctcagctgaatctccagggaggctgcagagcatcgtggagaccactttctgcctcggcctttaaatgctgactcacctcctctcggaggaggcgtcctgtcttcacgggggggtcccggtggcctccagacgtagccatttcctgacatcaagatgttgaatgtaatctggtctgagctgggcctgtgggaggggccgcctgaggcctgtgcgctgttgtcctcgcagatgtacttatttttgttcatgatacgggcgttccgttccttaaagatgtatatattttcttactgtacataaagatgttccttaagtcgtacagaaggtggcgcggcaaagggcctcgtgcagtgtgttcagattgcccctggggatcttctgtgtcttcagcgcccagccctgcgtgttcctggtgaagcagtttcacatcagtctctccagatagcactacgatgtattccgcttctgaacaggatcccatgccagtgtggaacaccttcccaatcttagttcagaagtggcttgtatgacctgttcaggggtcacatgaggtctcgccagtttcctgggtcctcttcagaggccagaaagttctaagttctgagtccccggccagggtcccttaacacctcggcacagaggctgttggcaagtgtagaggctgcctctgtgtgtggtttaagtaaactggaaatgagacattgacgtgctgctcctccagaggtctgcacactccacttcacatgccgttgactctcacagtctaagacttcagggccgggacctttgtccagcctgcacagtagagtgaggctgcctctcccgccaggcattgggatcccatttagaaacggcattcacttcagaaggtactttttaactgctcagtttttgactattttaaatagtttgctgaaaactcctgataacacttgctacatatcatgttttaattgcttgtacagttaacctttaattttatttagtaaagtgtatcaaagtaggacttttttgaattgtaaataggtggttttattaaataaaagtcaatgtaaaattgttaaaaaaaaaaaaaaaaaaaactcsagggggggg

SEQ ID NO: 168 - DNA, 865 bp, Homo sapiens
tcgacccacgcgtccggcacaggtgaccccgatctggtgtccgagggccgcaaaagcttccccagcatccattcctcctttgccttttcgggccttggcttcacgacgttctacttggcgggcaagctgcactgcttcaccgagagtgggcggggaaagagctggcggctctgtgctgccatcctgcccttgtactgcgccatgatgattgccctgtcccgcatgtgcgactacaagcatcactggcaagattcctttgtgggtggagtcatcggcctcatttttgcatacatttgctacagacagcactatcctcctctggccaacacagcttgccataaaccctacgttagtctgcgagtcccagcctcactgaagaaagaggagaggcccacagctgacagtgcacccagcttgcctctggaggggatcaccgaaggcccggtatgaccagtgtcctgggaggatggacactaagccctgggcacatctgccaccctgacatcataacacaatagaaatggttttctgtagtgtatttttcatcagttgtttctcaaagtcatcgtacttctgcttctgtttcactgatggtgttcctgctactttaaatgtctacttccaacatccttgaatttgcaagtgaaggacaacaatctctgagagacgtgtggaagaggctgtgaaggtggggtttggggagcttggccgattcgtctatctgaaatgtttgctgtaacagccaccttcctatgttttcatggttgtaaaacataataaaacctcccacgtggaagacttggtgttggcctaaaaaaaaaaaaaaaaaaaaaaaaaaaaaaaaaaaaaaaaaaaaaaaaaaaaa

SEQ ID NO: 169 - DNA, 1631 bp, Homo sapiens
ctcctctgtttcctgtgcagtagctcccgttgcggcggcacccgtggcagccctggcggacgcaggagcgatggcagcgaccgatatagctcgccaggtgggtgaaggttgccgaactgtccccctggctggacatgtggggtttgacagcttgcctgaccagctggtgaataagtccgtcagccagggcttctgcttcaacatcctgtgcgtgggagagacaggtttgggcaagtccaccctcatggacaccctgttcaacaccaaattcgaaggggagccagccacccacacacagccgggtgtccagctccagtctaatacctatgacctccaagagagcaacgtgaggctaaagctcacgatcgttagcacagttggctttggggaccagatcaacaaagaggacagctacaagcctatcgtggaattcatcgatgcacaattcgaggcctacctgcaggaagagctaaagatccgaagagtgctacacacctaccatgactcccgaatccatgtctgcttgtatttcattgcccccacgggtcattccctgaagtctctggacctagtgactatgaagaagctggacagtaaggtgaacatcatccccatcattgccaaagcagatgccatttcgaagagtgagctaacaaagttcaaaatcaaaatcaccagcgagcttgtcagcaacggagtccagatctatcagtttcctacagatgatgagtcggtggcagagatcaatggaaccatgaacgcccacctgccgtttgctgtcattggcagcacagaagaactgaagataggcaacaagatgatgagggcgcggcagtatccttggggcactgtgcaggttgaaaacgaggcccactgcgactttgtgaagctgcgggagatgctgattcgggtcaacatggaggatctgcgggagcagacccacacccggcactatgagctgtatcgccgctgtaagctggaggagatgggcttcaaggacaccgaccctgacagcaaacccttcagtttacaggagacatatgaggccaaaaggaacgagttcctaggggaactccagaaaaaagaagaggagatgagacagatgttcgtccagcgagtcaaagagaaagaagcggagctcaaagaggcagagaaagagctgcacgagaagtttgaccgtctgaagaaactgcaccaggacgagaagaagaaactggaggataagaagaaatccctggatgatgaagtgaatgctttcaagcaaagaaagacggcggctgagctgctccagtcccagggctcccaggctggaggctcacagactctgaagagagacaaagagaagaaaaactttttttaatcttgtcttcagcagctgcactaagtctaaaggagaagactgccattatagaagagttagggttccatattgtctcaaatcagaaatcaaccaatttcctctcccctcaaactgcaagcacacacacatacaccacaccactcaacaagtgttcatgtgtccctgtgtccaggcaagaagctctcttcctgactcacatggtattttaaatggaagtgtcttgtcctaactaacaagggaggaaaagaaccatcagagctggaaaatggac

SEQ ID NO: 170 - DNA, 1060 bp, Homo sapiens
ggcacgagcccgccccagcccgctgtggcgggaacattctggaagtgacggcaatctctgcggcagtcttctgtcggaagtgacgttgctatcccagaatcctcagagaaggagtagcgcgttcgtgcgtcctagttccagtacagcgtggagggtttaggcagcgtgttctgattctttgcgggacggcgagcgcatttgtgctttgcccgccgcggcctaggaggccttttgaggccgcgtagtcggtgtttttgaactgactctacagcttctggcaggccgtgcggcgccctgacccggcctcaccatgttggtgctgtttgaaacgtctgtgggttacgccatctttaaggtaggtgggagagcgagccgttaaagggggaaggcggatgctggacagacgaggagagggaaagacttaagcacggaactactcagagtagcgtgggtgcctgttatagcccgggctctgggaggagggagaaggcctttacacctgagagccatgttacgtgtaacacgtggccccgccgtttggggagacccgttctgcattagaggattttatttcctcccgttgaagaggtgggcaggaggcgtgttagaatttaacagattatagggaattcggactttattctagatgttttgaggaatgatcgaaagattttttttttttttgagatggagtttcgctcttgttgcccatgctggagtgcagtggcgcaatcttggctcactgcaacctccgtctcccgggttcaagcgattctcctgccttggcctcccgagtagctgggattacaggcctccatccaccaccacgcctggctagttgtttttgtttgtttgtttgcttttagtagagacggggtttcaccatgttggccaagctggtcttgaactcctgacctcaagcgatccacctgcctcggcctcccaaagtgctgggattacaggcgtgagccaccgtgctcggccaatcgaaaggatttaagcagaggaatgacctgctaatttgtcttaatacggttactctgctgtgtggagattagac

SEQ ID NO: 171 - DNA, 1159 bp, Homo sapiens
  misc_feature (992): n equals a,t,g, or c
  misc_feature (1132): n equals a,t,g, or c
  misc_feature (1134): n equals a,t,g, or c
gtgagccaccgtgcccagcctgaagtgttaaattttatgttgtgtatgttttaccacaataaatccctttaagttttgtttgtttgtttttaatctactacagccttgttagatgacttggataaagaactaaacaactacattatgcgatgtagagaatggtatggctggcatttccctgaattaggaaaaattatttcagataatttaacatactgcaagtgtttacagaaagttggcatccttttcattggctttctactttttcttttgactatttgctggattttatataatttgttgaagagtgattctccctcatcctctgcaaacattccataggcgataggaagaactatgcctctgccaagctttctgagttgctgccagaagaagttgaagcagaagtgaaagcagctgcagagatatcaatgggaacagaggtttcagaagaagatatttgcaatattctgcatctttgcacccaggtgattgaaatctctgaatatcgaacccagctctatgaatatctaccaaaatcgaatgatggcccattgcacccaatgttacagcatggttggggaattaagttggagcacggcttattgctcatgcaggtgatggttttaatgtaatttgtaaatatgagtgtttgaagtattttctggktaggattttgkttacatctttaaactacagctgttaaagaaattttagctgataacacaaaagtagatgatatgtgggagatcactaarggccaagtgttcaatgatgatttctatttgtttgcctgatttccttttggataatgaargcatctttagtcactacctcttctgagacacttgtggtccattgttagaartttgttagggttaattagaacaatcggatgaatgcaggaggataaaacagttaacattttcataataaaaactcactagacctagatttgaatacagttttaagaaatcactgtagagaaaganaaaaaaaagaaatcactgtagaggatttgtgcccttggattggattaccttagtttcactattggagtgtggaggatgtaatatatttgactttccaaaaatattttccaacaactggatttataatcaaaactttgtananggtggtatggccgttattataaggg

SEQ ID NO: 172 - DNA, 1783 bp, Homo sapiens
  misc_feature (1758): n equals a,t,g, or c
  misc_feature (1777): n equals a,t,g, or c
  misc_feature (1783): n equals a,t,g, or c
ccgaagcccagcagtatctgatggataatccaacttttgcagaagatgaggagttacaaaatatggacaaagaagatgcattaatttgctttgaagaacacattcgggctttagaaaaggaggaagaagaagaaaaacagaagagtttgctgagagaaaggagacgacagcgaaaaaatagggaatctttccagatatttttagatgaattacatgaacatggacaactgcattctatgtcatcttggatggaattgtatccaactattagttctgatattagattcactaatatgcttggtcagcctggatcaactgcacttgatcttttcaagttttatgttgaggatcttaaagcacgttatcatgacgagaagaagataataaaagacattctaaaggataaaggatttgtagttgaagtaaacactacttttgaagattttgtggcgataatcagttcaactaaaagatcaactacattagatgctggaaatatcaaattggctttcaatagtttactagaaaaggcagaagcccgtgaacgtgaaagagaaaaagaagaggctcggaagatgaaacgaaaagaatctgcatttaagagtatgttaaaacaagctgctcctccgatagaattggatgctgtctgggaagatatccgtgagagatttgtaaaagagccagcatttgaggacataactctagaatctgaaagaaaacgaatatttaaagattttatgcatgtgcttgagcatgaatgtcagcatcatcattcaaagaacaagaaacattctaagaaatctaaaaaacatcataggaaacgttcccgctctcgatcggggtcagattcagatgatgatgatagccattcaaagaaaaaaagacagcgatcagagtctcgttctgcttcagaacattcttctagtgcagagtctgagagaagttataaaaagtcaaaaaagcataagaagaaaagtaagaagaggagacataaatctgactctccagaatccgatgctgagcgagagaaggataaaaaagaaaaagatcgggaaagtgaaaaagacagaactagacaaagatcagaatcaaaacacaaatcgcctaagaaaaagactggaaaggattctgtaagtatttagaattgtttcatgcctgtattttcaaaatgcaaaaatgtattctgtggttaaaccatgatggtgttgaaagaataggcttttttccaggtgtgctaccattgaagaaaacagtgaaaattcagttaagtacatttcacacaatatcatagtttttggtcatgcatgatcctagattttattctcctaaatttgatattttttaaatatagcatttcataactatagccttattaactcactaagaaaggatatggtcactaagaagtgccactggacattttttacctaattttcaaattttttttttaagtgagagactaaatctgggattctacagatgtctacagttgtcactgttattaaatcctttgtttcaaaaggtagcaattccagtaacttttagaaatactgatttggggtggaggaagggcaaataaatagggagaggagaatataagccaaagttagtatttcagtaacagattacataattgagtccttttcaaatatatgtatatatggaatggacagagcctaaatgaatgccaaatgctgtgggtttagcaagggtaaatgcctatggaatcatcacgggagagcataaactatgtaggtnaaaaccctattagggatcnccgggn

SEQ ID NO: 173 - DNA, 1248 bp, Homo sapiens
ggcacgagtgggcgggctggcccatggctgagacctctctcccagagctggggggagaggacaaagccacgccttgccccagcatcctggagctggaggagctcctgcgggcagggaagtcttcttgcagccgtgtggacgaagtttggcccaaccttttcataggagatgcggccacggcaaacaaccgctttgagctgtggaagctgggcatcacccacgtgctgaacgccgcccacaagggcctctactgtcagggcggccctgacttctacggcagcagtgtgagctacctgggggtgccagcccacgacctccctgattttgacatcagtgcctacttctcctctgcggctgacttcatccaccgtgccctcaacacgcctgggggatggactcactgcagaagcaggacctccggaggcccaagatccatggggcagtccaggcatctccctaccagccgcccacattggcttcgctgcagcgcttgctgtgggtccgtcaggctgccacactgaaccatatcgatgaggtctggcccagcctcttcctgggagatgcgtacgcagcccgggacaagagcaagctgatccagctgggaatcacccacgttgtgaatgccgctgcaggcaagttccaggtggacacaggtgccaaattctaccgtggaatgtccctggagtactatggcatcgaggcggacgacaaccccttcttcgacctcagtgtctactttctgcctgttgctcgatacatccgagctgccctcagtgttccccaaggccgcgtgctggtacactgtgccatgggggtaagccgctctgccacacttgtcctggccttcctcatgatctgtgagaacatgacgctggtagaggccatccagacggtgcaggcccaccgcaatatctgccctaactcaggcttcctccggcagctccaggttctggacaaccgactggggcgggagacggggcggttctgatctggcaggcagccaggatccctgacccttggcccaaccccaccagcctggccctgggaacagcaggctctgctgtttctagtgaccctgagatgtaaacagcaagtgggggctgaggcagaggcagggatagctgggtggtgacctcttagcgggtggatttccctgacccaattcagagattctttatgcaaaagtgagttcagtccatctctataataaaatattcatcgtcataaaaaaaaaaaaaaaaaaaaaaa

SEQ ID NO: 174 - DNA, 1479 bp, Homo sapiens
ggcacgagtagccatgggcttgcggctcctgaagctggcagcgacgtccgcgtccgcccgggtcgtggcggcgggcgcccagcgcgtgagaggaattcatagcagtgtgcagtgcaagctgcgctatggaatgtggcatttcctacttggggataaagcaagcaaaagactgacagaacgcagcagagtgataactgtagatggcaatatatgtactggaaaaggcaaacttgcaaaagaaatagcagagaaactaggcttcaagcactttcctgaagcggggattcattatccagacagtaccacaggagatgggaagcccctcgccaccgactataatggcaactgtagtttggagaaattttacgatgatccgagaagcaatgatggcaacagttaccgcctgcagtcctggttgtacagcagtcgcctgctgcagtactcagatgccttggagcacttgctgaccacaggacaaggtgttgtgttggagcgctccatcttcagtgacttttgtgttcctggaggcgatgtacaaccagggattcatccgaaagcagtgtgtggaccactacaacgaggtgaagagcgtcaccatctgcgattacctgcccccccacctggtgatttacatcgatgtgcccgttccagaggtccagaggcggattcagaagaaaggagatccacatgaaatgaagatcacctctgcctatctacaggacattgagaatgcctataagaaaacctttctccctgagatgagtgaaaaatgtgaggttttacaatattctgcaagggaagctcaagattcaaaaaaggtggtagaggacattgaatacctgaagttcgataaagggccgtggctcaagcaggacaatcgcactttataccacctgcgattactggttcaggataagtttgaggtgctgaattacacaagcattcctatctttctcccggaagtcaccattggagctcatcagactgaccgtgtcttacatcagttcagagagctgccgggccgcaagtacagccctgggtacaacaccgaggtgggagacaagtggatctggctgaagtgaacgggccgccttctgctccagctgcatcacagtgatggccaagctgcatcagccgcactctcctggacgccatatagctttaagatcgggggagggtaaataatgcaaaaattgcacagtggaagaaggggtctcacaaaaagcaatccatcctgtagtataggtaatggagttgggggaagcagcttccattctggatgtttggaaccctttagctttgttttggaatggcccaccattctcactggaaaacagtggtctgctgtgaaaggccagctctcggcagcccctgtggtttcagcgctgctgctctgtgtcattcaggttgtgcacattgtttttcttctgacttccagaaataaaagtgtttccatgggaaaaaaaaaaaaaaaaaaaa

SEQ ID NO: 175 - DNA, 542 bp, Homo sapiens
  misc_feature (507): n equals a,t,g, or c
  misc_feature (508): n equals a,t,g, or c
ggtgtttcctgccctatcacacactgaggaccgtccacttgacgacatggaaagtgggtttatgcaaagacagactgcataaagctttggttatcacactggccttggcagcagccaatgcctgcttcaatcctctgctctattactttgctggggagaattttaaggacagactaaagtctgcactcagaaaaggccatccacagaaggcaaagacaaagtgtgttttccctgttagtgtgtggttgagaaaggaaacaagagtataaggagctcttagatgagacctgttcttgtatccttgtgtccatcttcattcactcatagtctccaaatgactttgtatttacatcactcccaacaaatgttgattcttaatattwagttgaccattacttttggtaataagacctacttcaaaatttattcaggggatttcagttgtgagtcttaatgagggattcaggaggaaaaatcctactagagtcctgtgggctgaaatatcannactggggaaaaaatgcaaagcacattgggatcct

SEQ ID NO: 176 - DNA, 1932 bp, Homo sapiens
gggtcgacccacgcgtccgggggccctggagcccgcgctgcctgcgcaggccaaggaggagctggcggcagccatggtgcgcgtgctgcgggccaccggccgggcgcaggcgctggtgactgacctgggcactgcggagctggcgcgctgtggaggccgtgaggcgctgctgttccgggaaaacacattggccaccaaggctatcgatgagtacatgaagctcgtggcacaggattacctccaggagaccctgggacaggttgtgcggcgtctctgtgcttctactgaggactgtgaagtggaccccagcaaatgtccagcctcggagctgccagagcaccaggccagacttcggaacagctgcgaggaggtcttcgaaaccattatccattcctacgactggttccctgcggagctgggcatcgtgttctcaagctggcgagaagcatgtaaagaacgtggctctgaggtgctgggcccccgactggtgtgcgcctccctcttcctgcggctcctgtgccctgccatcctggcacccagcctctttggtttggcaccagaccatccagcacccggcccagcccgcaccctcacactgattgccaaggtcatccagaacctcgccaaccgtgccccgttcggtgagaaggaggcctacatgggcttcatgaatagcttcctggaggaacatggaccagccatgcaatgcttcctggaccaggtagccatggtggatgtggatgctgcccccagtggttaccagggcagtggtgatctggccctccagttagctgtcctgcatgcccagctctgtacaatttttgctgagcttgaccagacaacccgagacaccctggaaccactgcccactatcctgcgagccattgaggagggccagcctgtgcttgtgtcagtgccaatgcgtctcccactgcccccggcccaggtccactccagcctctccgcaggggagaagcccggcttcctggccccccgggacctccccaagcacacccctctcatctccaagagccagtctctgcgcagcgttcgccgctcagagagttgggcccggccacggccggacgaagagcggcccctgcggcggccccggccggtgcagcgcacgcagagtgtcccggtccggcgtcctgcccgccgccgccaatctgcggggccctggccgcgacccaaaggctccctgagcatgggaccagcgccccgcgcccggccttggacccgggactccgcctcgctgcctcggaagccgtcggtaccctggcagcgccaaatggaccagccgcaagaccgaaaccaggcactgggcacgcaccgacctgtgaacaagttggcagagctgcagtgcgaggtggccgctctgcgtgaggagcagaaagtgctgtcccgcctcgtggagtcgctgagcacccaaatccgggccttgacggagcagcaggagcagctgcggggccagctgcaggatctggactccaggctccgtgctgggagctcagagtttgattcagagcacaacctaacaagcaatgaagggcacagtctgaaaaacctggagcaccgcctaaatgagatggagagaactcaggctcagctgagggatgctgtccagagcctgcagctttctccaggacgcgggggtcttggagtcaaccccagcccctcaaagcaccctgcctcaatggagacaccacctgagctgcccatcctgcctcatcacacgtggtctgggagcagagagatagccatcttagggggggtgtctgactttgccttagccctacttggcctacagtggggagtggagctgctggtcccaaccactctggcagtatgaagttgcccagtaaaatcttgatttcagtgaaaaaaaaaaaaaaaaaaaaaaaaaaaaaaaaaaaaaaaaaaaaaaaaaaa

SEQ ID NO: 177 - DNA, 1104 bp, Homo sapiens
gagaattcctgagttttgctgatgacttactctctggcctgggcacatcttgtgtagcasctggtcgaagccatrgagaggtccctgaagtcagtatctactcagtcatcttcaagtgtctggagcccgacggtctctacaagttcactctgtatgctgtggatacacgagggaggcactcagagctaagcacggtgaccctgaggacggcctgtccactggtagatgacaacaaggcagaagaaatagctgacaagatctacaatctgtacaatgggtacacaagtggaaaggagcagcagatggcctacaacacactgatggaggtctcagcctcgatgctgttccgagtccagcaccactacaactctcactatgaaaagtttggcgacttcgtctggagaagtgaggatgagctggggcccaggaaggcccacctgattctacggcgactggagagggtgagtagccactgctccagcctcctgcggagtgcctacatccagagccgcgtggaaacagtgccctatcttttctgccgcagcgaggaggtccggcctgcaggcatggtgtggtatagcatcctcaaggacaccaaaatcacgtgtgaggagaagatggtgtcaatggcccgaaacacgtacggggagtccaagggccggtgagggagggtattgccctccgtgagcacagagactctccatgggagggggagcagtattctcctggatcctggggcctgggtgggctgggggacagctgaggatgggcctagcagatgaagcttgccagcaaggccaaagcaaacggtttctcctgtggatagtggacagagacctttgtaaccaatggaattattcatttttctctatcttttattttttcaaagatattatttgactctatmaaaagtctctcctttttaaaccttttcttatggatggctgtcaatcccaaggcagaagttttcaggtggagaccaagcggcctttgctcttcttccttcttcctgccacactctgctttcttcctgccatggacccctggaggagacctatggagggacagttttgacctgacccctagaggagacagttttgacct

SEQ ID NO: 178 - DNA, 1506 bp, Homo sapiens
  misc_feature (1): n equals a,t,g, or c
  misc_feature (6): n equals a,t,g, or c
  misc_feature (15): n equals a,t,g, or c
ncgggnccccccccnaggttttttttttttttttactattcgttaggcttttatttttctctatgttctgcagtaactaaggaaaatcatggtaaatgtcaatcttcacacaacagcagacacaaagggtttcagaaacgtcagatatgaagaaatcctccatccttcttcaacattttactgggtatttcaacttcaaaagaacagcttatttctataagtgctgtacaagatcatagattatgatggaacgacttcattttagaacgttagcaaaactgttatactaaatgtcaatgacaggaaacaaagaaaaaaatttgttcaattatatttttaaacatattgttattctcaacaaacggaattttaaaacgaatacaattttccattatcaaaagcaaacactctatttcgcagttgaacaatgatcactgatcacaaatatcaaatacagtgtcccccgcccccaatcgacatcattttcaacttaggaccctggcatctactccttggggtacctgtgactctcttttacacccccaagggtctgcctcagatctacttaaggggcggaataacccctagcacctgaattgaggatagcctcaacctctgcatcatcgtccgaatcccagtcataattacaaggccagtctttagagcatcggttacgaacccttgccacaaaatgcatgactttcagtttgctcgattccacgtgtgctcggggcccccagaagaactcatactccaccggactgctacggggcaccggtttataaatcaggtaccctctgcgcacaaactcttctgtgacgatcttcttcggatctccaaagatgctgtgctgacgtccaggctgcattcctaacttccccagcactttccagaccagagcttccttggcgctgttgcccatgatgaagatgagcgctaatatagacatcaggagacttttcttggtgccctgaaaattgctccggggcactgaaggcttttgtgcttgggcagtgctcgaggcttcttcaggggtggtagaggcctcctctggagtgctcgggtcttcctcggggccgctcaggtcgtcttcgggggtgctcgctaccacagaggcggccataggggtctcggaggcctctgaggcctggattttgcgattgttgcggttctcttctgcggctctcgcattacggcggcgccgactctttcgtccccgaggcatgtctcctgctagaggctcaaagcttacagcagtcctagggaaggatgcttgtagcctcttcaggaagcaacagctttataccgtaagaagctgctgccgctgaagctaccaatgtcaatagagtctttgtagcaataaacaagccgttctcagctacaaagggtagttcccacgccagctgacttgcgcgagcagccgccgccagcacttgccgcagctgcaagcccgcgagaaagctcagcaaaattgccccgcctctcctgccacgcgaattcttccag

SEQ ID NO: 179 - DNA, 2925 bp, Homo sapiens
ggtacgcctgcaggtaccggtccggaattcccgggtcgacccacgcgtccgcagggaggggtgcgaggctagccacgcaggcggggccctgggtcattttaaactctcagagtgaacgtcttgataggaccgacaagacgcatgacatgtacttagaaagcttatcttagagccacactgagattggaacccgcaaaatatgccaggaaacgccaccccagtgaccaccactgccccgtgggcctccctgggcctctccgccaagacctgcaacaacgtgtccttcgaagagagcaggatagtcctggtcgtggtgtacagcgcggtgtgcacgctgggggtgccggccaactgcctgactgcgtggctggcgctgctgcaggtactgcagggcaacgtgctggccgtctacctgctctgcctggcactctgcgagctgctgtacacaggcacgctgccactctgggtcatctatatccgcaaccagcaccgctggaccctaggcctgctggcctgcaaggtgaccgcctacatcttcttctgcaacatctacgtcagcatcctcttcctgtgctgcatctcctgcgaccgcttcgtggccgyggtgtacgcgctggagagtcggggccgccgccgccggaggaccgccatcctcatctccgcctgcatcttcatcctcgtcgggatcgttcactacccggtgttccagacggaagacaaggagacctgctttgacatgctgcagatggacagcaggattgccgggtactactacgccaggttcaccgttggctttgccatccctctctccatcatcgccttcaccaaccaccggattttcaggagcatcaagcagagcatgggcttaagcgctgcccagaaggccaaggtgaagcactcggccatcgcggtggttgtcatcttcctagtctgcttcgccccgtaccacctggttctcctcgtcaaagccgctgccttttcctactacagaggagacaggaacgccatgtgcggcttggaggaaaggctgtacacagcctctgtggtgtttctgtgcctgtccacggtgaacggcgtggctgaccccattatctacgtgctggccacggaccattcccgccaagaagtgtccagaatccataaggggtggaaagagtggtccatgaagacagacgtcaccaggctcacccacagcagggacaccgaggagctgcagtcgcccgtggcccttgcagaccactacaccttctccaggcccgtgcacccaccagggtcaccatgccctgcaaagaggctgattgaggagtcctgctgagcccactgtgtggcagggggatggcaggttgggggtcctggggccagcaatgtggttcctgtgcactgagcccaccagccacagtgcccatgtcccctctggaagacaaactaccaatttctcgttcctgaagccactccctccgtgaccactggccccaggctttcccacatggaaggtggctgcatgccaaggggaggagcgacacctccaggcttccgggagcccagagagcatgtggcaggcagtggggcctcttcatcagcagcctgcctggctggctcccttggctgtgggcaggtagcacgcctgctggcagaggtacctggtggctgccctgttcgcatcagtggcgatgactttatttgcggagcatttctgcaagcgttgcctggatgcggtggtgcattgtgggccctctgggctcctgcctcagaatgtcagtgagcaccatgctggaggtcacccagcactgtggcagcgcccaggagggcatagggcagcctaccacctccaagggggcaggcgccctcatctggggttgggtctgtgctgagctggagggcctctagggaaccgtggggcagggtggccagctgctggctcccagagcgcagccaggcgtcctcaacggggagccccaaatgtccacgcccagaacaacagttggcaggacaggtgtgacacagccacagcagaggcaaggggtgccaggagtccccagcggcatcctcggggagatgctggtgaggggtccgtacagggtggggtccccaccyctagccccttactgargggggagtgcagcagttggcctgcttgtctggcggagaaagccagctccctgcaccctcggggctgagtcagatctgggtctgccgcaaaggccttgcctagaccaggtcacactgatgccctggtttccctatctgtaaaatggggccaatgacacctacctcactgggtcaccatcgagatcaatcctcctccctgccccgacacctcgggcacatcgcatgcactcagagcacagagccgggcagacgcagcacctgcatggggagcccagtgcccggcacagcacaggggcttccagggaggccacgcagggccgtggggctgagccacgctctcgttttgtcaggcagctatgcagttgctcttccttgtttttgttttgtttttgtttttgtttttaatatttatttttttagagacagggccttgctctgttgcctgggctggagaacagtggcaccatcatagctcactgcagcctcaaactcctgggctcaagcgatcctccccgctcagcctcctgagtagctgggactacaggtgtgcaccaccacacccagccaaaacagccatcctccccttgagagtcatcagaaaaatacattaggaaaatgtgtttagaaataaaagcacaaggcagggcagtgctcacgcctgtcatcccagcactttgggaggccgagacgggaggatcagttgaggtcaggagtttgagaccagcctcggcaacatggcaaaatcttgtctcttttttttggtattaaaaaaatcataaaaataaaagaaataatgcaaaaaaaaaaaaaaaaaaa

SEQ ID NO: 180 - DNA, 904 bp, Homo sapiens
  misc_feature (538): n equals a,t,g, or c
  misc_feature (715): n equals a,t,g, or c
  misc_feature (799): n equals a,t,g, or c
  misc_feature (893): n equals a,t,g, or c
agttataccaccaatgagaacacacacaatcttaaaaggaaagactgcatgctattttaaaatgttaccctgctgaggtgaagggaagaaatatctaaaagtgagggttcatagtcttacggccacttctaggttcctatcagccgacactcagaaagagtctaaaagaaaaactttggaagaagagcagcgtgctctgcagtgaccagaagaaaggcattacttcagtattttctgtatattatactatggattgattatcccttatccaaaacgcatgctaccagaaatattttgaatttcagatatttttgtatattggaatatctgcattatatttactggtttagcgccttattccaaaatcctaaaatttaaaatgcttctataagcatttcctttgaatattatgtgggttctcacacagttttggatttcagatcatttcaaaatttaaatttttggattaaaaattctaggcctgtagacctasagtcctggactaaaatggactttcrgtacgctttccttaaccttnccacactyccaaccacacacacatacctgccctcagacattcwtcagcttccttattttaatgkcctgaaaagaggtggaaacatcttgtcaaagtcatcctttcagtgctgggcatctgtgctttatcatctggctgctcaaatgaaagtcgaacccgaaagagaaaggaaagtcnggagaccggtttttctgaaaagtttgttgactcatgccgaaagactacaaccagattagcaaaataagtgacaaagaccaaagncttgtgtctgcaacaagttagccatgtgcttatcttagcattgaatgaccctccctggggctttttaaatctgcggttggctctaatagccatnacggagactcc

SEQ ID NO: 181 - DNA, 441 bp, Homo sapiens
  misc_feature (14): n equals a,t,g, or c
  misc_feature (35): n equals a,t,g, or c
  misc_feature (62): n equals a,t,g, or c
  misc_feature (117): n equals a,t,g, or c
aaaattagtgcagnggagaaaacaatttttaatgnaatcttgattttacctcatatactgtncattccaaaaactctaaactttttaaagattatagatacactaccaaacatatcnccttaaaattgtataaggctgaatgaacttcatacaaatgaaaaaaatctcataaaaatacataaactatgtagcaaaagtatctgtaaaatccatggaaaataaaagttgtatcattctttttgagatacgtttattgtattcatatatattcattatttgctacctgtttaagaaagtgaaatgttatggtctcccctcttccaatgagcttaaaacatttttcccaacagtatataaatcttcaacatgagaggatgtatatttattatataaagcccagtaaagaataaaattagaagttttatcctagtaaaaaaaaaa

SEQ ID NO: 182 - DNA, 368 bp, Homo sapiens
  misc_feature (20): n equals a,t,g, or c
  misc_feature (36): n equals a,t,g, or c
  misc_feature (88): n equals a,t,g, or c
caaacgcattggctatttangggcaatgctgctgtnagatgaaagacaagatgtccatcttctcatgaccaactgtatcaagaatgancttaatcatagcacgcaattcgtacaggggttagcactttgtaccctcggctgcatgggytsctcagagatgtgcagagatcttgcaggagaggtagagaagctcctgaaaacctccaactcttacttaagaaaaaaggcagcactgtgtgctgttcatgtcatcaggaaagttcctgaacttatggagatgtttttaccagcaacaaaaaatttattggatgagaagaacccatggtgtcctccacacatctgtagtcctcctcaccagaatgtgtgag

SEQ ID NO: 183 - DNA, 694 bp, Homo sapiens
  misc_feature (588): n equals a,t,g, or c
  misc_feature (639): n equals a,t,g, or c
  misc_feature (655): n equals a,t,g, or c
  misc_feature (688): n equals a,t,g, or c
  misc_feature (692): n equals a,t,g, or c
aaatgcatcaggttataacccaataagcccatcatgaagttgaaaaattgtaaattgaaccattgtaattcagatgcttcttgatttaagatgggattatgtcctgataaacccatcataaagccaaaacatcttaaattaaaccatcctaagtcagggacagtctgtaggtagtccagaattgaagtgaattagtggatacccagctggcatctactgtagaattgactgcttacctgatgtgtgtggtaagaccccacccatctggtatcagaattgtgttgtgagagtgtggcaggagaaactgagtctgtttattcctgtatacacacagggcttcgtgctgtgtcactccatcgctgggggtacgggttctggcctgggctcctacctcctggagcgactgaatgacaggcaagcctgtgtttggggagagggcattaaccctggttccctgagtaatgtcattgcttttttctcttgagctagaaagtctgccactaccccttttgagtcatagggacagacccacccaaggaccatgttggaagctattttggggggtgggggtttacctgtggaggggangggatctacagagtttgaaagctttcaggcttatcctttttggctctgaanactcagttctgccctnaccccttttgtacaaaatggccatatgggcagngatnga

SEQ ID NO: 184 - DNA, 918 bp, Homo sapiens
  misc_feature (741): n equals a,t,g, or c
  misc_feature (771): n equals a,t,g, or c
  misc_feature (817): n equals a,t,g, or c
agaagcgttttgactttgagcaagttactgtgaaaaaattcaggacttgggctgagcggcggcaattcaatcgggaaatgaagcggaacaggcggagtccgagaggcccatcttgccagccaatcagaagctcattactttatcagtgcaagatgccccacaaagaaagagtttgttattaaccccaacggaaatccgaggtctgcatcctgcacgagtacatgcagcgtgtcctcaaggtccgccctgtctaatttctttgaatgtgagaacccaagtgagccttttggtgcctcggtgaccattgatggtgtgacttacggatctggaactgcaagcagcaaaaaacttgcgaagaataaagctgcccgagctacactggaaatcctcatccctgactttgttaaacagacctctgaagagaagcccaaagacagtgaakaactcgagtattttaaccacatcagcatcgaggactcgcgggtctaccagctgaccatcaaggctgggctgttgtctccatatcagatcctccacgagtgccttaaaagaaaccatgggatgggtgacacgtctatcaagtttgaagtggttcctgggaaaaaccagaagartgaatacgtcatggcgtgtggcaagcacacagtgcgcgggtggtgtaagractccttctctgctgcctggtggccgctgggcgggtggcccctggtgtggccctgcgcctctgtggcttggtctcanctgttgccctggcattgtccctgagcccanctgtgtgtgctggccaccacacgttcagcctaaggcggactggcanccgtcctgcctgcactttccctgtcttttccctttcccccgctgtcacccctgtctccgtccagcccttgtccctgtggcaggaggaaaggcctcctcctc

SEQ ID NO: 185 - DNA, 240 bp, Homo sapiens
tcgacccacgcgtccgggctgggagaggaaagccatggctgacaagatcctgaaggacagacggaggctktwtgtcagctcagtgagccccgggaccctcagcagcttgctggcatgagctcttagacaaaaaagtgctaaaccaggaggagatggagagagtgagatgcgaaaacgctaccacgatggacaaggcccgggctctgatcgactccatcattcggaaagggccacaggctg

SEQ ID NO: 186 - DNA, 785 bp, Homo sapiens
  misc_feature (631): n equals a,t,g, or c
  misc_feature (684): n equals a,t,g, or c
gagcggagccgtgaggacctctcagctctgacccgacagggccgctacccgccctacgaacgagtggtgttgcgagaagccagtttcaagcgcccggtagtgatcctgggacccgtggccgacattgctatgcagaagttgactgctgagatgcctgaccagtttgaaatcgcagagactgtgtccaggaccgacagcccctccaagatcatcaaactagacaccgtgcgggtgattgcagaaaaagacaagcatgcgctcctggatgtgaccccctccgccatcgagcgcctcaactatgtgcagtactaccccattgtggtcttcttcatccccgagagccggccggccctcaaggcactgcgccagtggctggcgcctgcctcccgccgcagcacccgtcgcctctacgcacaagcccagaagctgcgaaaacacagcagccacctcttcacagccaccatccctctgaatggcacgagtgacacctggtaccaggagctcaaggccatcattcgagagcagcagacgcggcccatctggacggcggaagatcagctggatggctccttggaggacaacctagacctccctcaccacggcctggcgcacagctccgctgacctcagcntgcgacascgcgtttaacagcgaytacgagacggacggcgagggcggcgcgtnacacggatggcgagggttacacagacgggcgagggggggcccttacacggatgtggattgatgagcccccgtttcagccttggcccgttcyttggagcccc

SEQ ID NO: 187 - DNA, 1314 bp, Homo sapiens
ggcaacctatcggactgccattgttcagaatcagcaccttgccatgctagcaaagaaacttgaactggatcgatttatgctgtatgctcacgggcctgacctttgtagagaatcggaccttcgacatgcaatggccaattgttttgaagcgttaataggagctgtttacttggagggaagcctggaggaagccaagcagttatttggacgcttgctctttaatgatccggacctgcgcgaagtctggctcaattatcctctccacccactccaactacaagagccaaatactgatcgacaacttattgaaacttctccrgttctacaaaaacttactgagtttgaagaagcaattggagtaatttttactcatgttcgacttctggcaagggcattcacattgagaactgtgggatttaaccatctgaccctaggccacaatcagagaatggaattcctaggtgactccataatgcaactggtagccacagagtacttattcattcatttcccagatcatcatgaaggacacttaactttgttgcgaagctctttggtgaataatagaactcaggccaaggtagcggaggagctgggcatgcaggagtacgccataaccaacgacaagaccaagaggcctgtggcgcttcgcaccaagaccttggcggaccttttggaatcatttattgcagcgctgtacattgataaggatttggaatatgttcatactttcatgaatgtctgcttctttccacgattgaaagagttcattttgaaycaggattggaatgaccccaaatcccagcttcagcagtgttgcttgacacttaggacagaaggaaaagagccagacattcctctgtacaagactctgcagacagtgggcccatcccatgcccgaacctacactgtggctgtttatttcaagggagaaagaataggctgtgggaaaggaccaagtattcagcaagcggaaatgggagcagcaatggatgcgcttgaaaaatataattttccccagatggcccatcagaagcggttcatcgaacggaagtacagacaagagttaaaagaaatgaggtgggaaagagagcatcaagagagagagccagatgagactgaagacatcaagaaataaaggagggcatgcaagtgtggagtatttacttgctcagtaactgtgactgttgtctattgagacctagcctagttttcctgcagacaatgaaygaagtgtgctcattgaaataaaatacagagtcaaatcgcaaaaaaaaaaaaaaaaaaaaaaaaaaaaaaaaaaaaaaaaaaaaa

SEQ ID NO: 188 - DNA, 585 bp, Homo sapiens
  misc_feature (465): n equals a,t,g, or c
ctgatacccaggagtctccagcttccaagagaggtcgggtcacagccagcagctatgtctgacataaatcttgactgggttgacaggcgtcagttgcagcgyttggaggaaatgctgattgttgtggatgagaatgataaggttattggtgccgacaccaagaggaattgccatctgaacgaaaacattgagaaagggctgctgcaccgarccytcagcgttgtcttgtttaacaccaagaatcgaatcctgatacagcagargtcggacacraaagtcacgtttcctgatttctccagaggacattgtgttcatgacaatctatcaccacaaggcaaaatcagacagaatttggggagagcatgaaatttgttaccttctgcttgtgaggaaaaacgtcactctgaacccggatcccagtgaaacgaaaagcatcctctacctgtcccgggrggagctgtgggnagctgctgggagagggaggcgaggggtgaagtcaaaggtcaccccctgggctaagaaccattgccgagaggtttctgtaccggtggtgggcctcaccgggggtgacgtgaccccgttttt

SEQ ID NO: 189 - DNA, 1511 bp, Homo sapiens
  misc_feature (1511): n equals a,t,g, or c
ttggccggctttccccgtcaagctctaaatcgggggctccctttagggttccgatttagtgctttacggcacctcgaccccaaaaaacttgattagggtgatggttcacgtagtgggccatcgccctgatagacggtttttcgccctttgacgttggagtccacgttctttaatagtggactcttgttccaaactggaacaacactcaaccctatctcggtctattcttttgatttataagggattttgccgatttcggcctattggttaaaaaatgagctgatttaacaaaaatttaacgcgaattttaacaaaatattaacgcttacaatttgccattcgccattcaggctgcgcaactgttgggaagggcgatcggtgcgggcctcttcgctattacgccagctggcgaaagggggatgtgctgcaaggcgattaagttgggtaacgccagggttttcccagtcacgacgttgtaaaacgacggccagtgaattgtaatacgactcactatagggcgaattgggtaccgggccccccctcgagtcatcagccatgtgcctgaaaacacaaagggggcagtgaaaaaacacctaaaccaaaagaaaaaagagcaggaactgaccagcaaaatgccagcagttgctttatggtggagttcgtcattttggttgtgtaatgtaaagggtaacacacggcataaaatcggtcaatagcaatggaacagaggtggaaaatggaggtcagtctgagcatcatgtcaaagcttgtgtggaatttacaaaagccatccccaaagtaccagcaactctccactgatcgcattatgctgtatggcataatgacaaaacccagcagaaagtccgtggttgccatggagaggatcagaaagtttgtgggagagtgaagctgtttgaaatgcgatatggaaaccattataaccaagtttccgaatagtgataatcatggctccagtcataaccgaatacattatcacctggacatgaaaagagcggttggtgggaggacaggatttatttacaaattttggacaactggataggtcttcgggaatataagttagatccatggtgctttatcccttgaaatttctttccaggaggatgagtcactcgtgccgaattcctgcagcccgggggatccactagttctagagcggccgccaccgcggtggagctccagcttttgttccctttagtgagggttaatttcgagcttggcgtaatcatggtcatagctgtttcctgtgtgaaattgttatccgctcacaattccacacaacatacgagccggaagcataaagtgtaaagcctgsggtgcctaatgagtgagctaactcacattaattgcgttgcgctcactgcccgctttccagtcgggaaacctgtcgtgccagctgcattaatgaatcggccaacgcgcggggagaggcggkttgcgtattgggcgctcttccgcttcctcgctcactgactcgctgcgctcggccn

SEQ ID NO: 190 - DNA, 3256 bp, Homo sapiens
  misc_feature (3220): n equals a,t,g, or c
gaattcgtgctcttagggtggttgggtggtaagatggcggctgtgagtctgcggctcggcgacttggtgtgggggaaactcggccgatatcctccttggccaggaaagattgttaatccaccaaaggacttgaagaaacctcgcggaaagaaatgcttctttgtgaaattttttggaacagaagatcatgcctggatcaaagtggaacagctgaagccatatcatgctcataaagaggaaatgataaaaattaacaagggtaaacgattccagcaagcggtagatgctgtcgaagagttcctcaggagagccaaagggaaagaccagacgtcatcccacaattcttctgatgacaagaatcgacgtaattccagtgaggagagaagtaggccaaactcaggtgatgagaagcgcaaacttagcctgtctgaagggaaggtgaagaagaacatgggagaaggaaagaagagggtgtcttcaggctcttcagagagaggctccaaatcccctctgaaaagagcccaagagcaaagtccccggaagcggggtcggcccccaaaggatgagaaggatctcaccatcccggagtctagtaccgtgaaggggatgatggccggaccgatggccgcgtttaaatggcagccaaccgcaagcgagcctgttaaagatgcagatcctcatttccatcatttcctgctaagccaaacagagaagccagctgtctgttaccaggcaatcacgaagaagttgaaaatatgtgaagacctccttcttcctaggtgaagtgggcaatgcagccaagatgatgctgatcgtgaacatggtccaagggagcttcatggccactattgccgaggggctgaccctggcccaggtgacaggccagtcccagcagacactcttggacatcctcaatcagggacagttggccagcatcttcctggaccagaagtgccaaaatatcctgcaaggaaactttaagcctgatttctacctgaaatacattcagaaggatctccgcttagccattgcgctgggtgatgcggtcaaccatccgactcccatggcagctgcagcaaatgaggtgtacaaaagagccaaggcgctggaccagtctgacaacgatatgtccgccgtgtaccgagcctacatacactaagctgtcgacaccccgccctcacccctccaatcccccctctgaccccctcttcctcacatggggtcgggggcctgggagttcattctggaccagcccacctatctccatttccttttatacagactttgagacttgccatcagcacagcacacagcagcacccttcccctgaggccggtggggaggggacaagtgtcagcaggattggcgtgtgggaaagctcttgagctgggcactggccccccggacgaggtggctgtgtgttcacacacacacacacacacacacacacacacacacacacaggctctcgccccaggatagaagctgcccagaaactgctgcctggctttttttcttccgagcttgtcttatctcaaaccccttccagtcaaggaactagaatcagcaacgagagttggaagccttcccacagcttcccccagagcgaagaggctgtagtcatgtccccatcccccactggattccctacaaggagaggccttgggcccagatgagccagtacagactccagacagaggggcccttggggccctccaacctcaggtgatgagctgagaaagatgttcacgtctaagcgtccagtgtgcacccagcgctccatagacgcctttgtgaactgaaaagagactggcagagtcccgagaagatggggccctggctttccagggagtgcagcaagcagccggcctgcaggtgagcatggaggcccggccctcaccgcctcgaagccatgccccagatgccactgccacagcgggcgctcgctcctccctaggctgttttagtatttggatttgcattccatcccttgggagggagtcctcagggccactagtgatgagccaagaggagtgggggttgggggcgctcctttctgtttccgttaggccacagactcttcacctggctctgacttacctcggtcccctcccagtggtcccaccttctccaccctgccctgccaagtcccctgcatgcccaccgctctccatcctccctcctctccctcttcctcccgtggagacagtatttctttctgtctgtccctttggcccagacccagcctgaccaacgatgagcatttcttaggctcagctcttgatacggaaacgagtgtcttcactccagccagcatcatggtcttcggtgcttcccgggcccggggtctgtcgggagggaagagaactgggcctgacctacctgaactgactggccctccgaggtgggtctgggacatcctagaggccctacatttgtccttggataggggaccggggggggcttggaatgttgcaaaaaaaaaagttacccaagggatgtcagttttttatccctctgcatgggttggattttccaaaatcataatttgcagaaggaaggccagcatttacgatgcaatatgtaattatatatagggtggccacactagggcggggtccttcccccctcacagctttggcccctttcagagattagaaactgggttagaggattgcagaagacgagtggggggagggcagggaagatgcctgtcgggtttttagcacagttcatttcactgggattttgaagcatttctgtctgaacacaaagcctgttctagtcctggcggaacacactgggggtgggggcgggggaagatgcggtaatgaaaccggttagtcaattttgtcttaatattgttgacaattctgtaaagttcctttttatgaatatttctgtttaagctatttcacctttcttttgaaatccttcccttttaaggagaaaatgtgacacttgtgaaaaagcttgtaagaaagcccctcccttttttctttaaacctttaaatgacaaatctaggtaattaaggttgtgaatttttatttttgctttgtttttaatgaacatttgtctttcagaataggattgtgtgataatgtttaaatggcaaaaacaaaacatgattttgtgcaattaacaaagctactgcaagaaaaataaaacacttcttggtaacamaaaaaaaaaaaaaaagggggggcccggacccattcncccaaagggggcgtttaaatccatgccggcgttaaa

SEQ ID NO: 191 - DNA, 798 bp, Homo sapiens
ggatctctctgtgaaaatgctaaaagattttcttgaagatgacactgacgtgaaccagtatcttttaccaccaaagtcattgctgcgatatgctcttctgttagacattgttcagcccacttgtagaaggtccgtgtgctttaccaaaggatatggaagctacatagaagggacagggtctgtgttacagactgcagaggatgtgcaggttgagaatatctacaaatcccttaccaatttgtcacaagaagaacagataacaaagctgttaatacttaaactgcgatatttcactcctaaagaaatagcaaatctccttggatttcctccagagttcggatttcctgagaagataacagtgaaacagcgttatcgcctacttggaaatagtctcaacgtgcatgtagtagctaaactaatcaaaatcttatatgaataattttgaaataactctgaaagatggtcatatgatattccttcattttcagagagtaattctgaaattctgttttgaactaattctggtgaaatttaactaaattattttaatctgtccttattaagaaatttggattttattaaaaaaatccatgtgtttcatcaaatttatattactgtattttataaaatacgaactattgttatgctttatggagagtatattttcatatgaaactgataaatatatatgtggaatattctttttaaaaacaattttataaacaaatcaaggagcactagrgctttagtgtctacatgagtatcttgtgaagtgtcataacaggcataacmtatttt

SEQ ID NO: 192 - DNA, 574 bp, Homo sapiens
  misc_feature (568): n equals a,t,g, or c
gccagctccctgtggaagagtaagctccttgtcagctaccaggagatccccttttatcacatctggaatggcacgcagcggtacttgcactgcaccttcaccctggagcgtgtcagccccagcactagtgacctggcctgcaagctgtgggtgtggcaggtggagggcgacgggcagagcttcagcatcaacttcaacatcaccaaggacacaaggtttgctgagctgctggctctggagagtgaagcgagggtcccagccctggtgggccccagtgccttcaagatccccttcctcattcggcagaagataatttccagcctggacccaccctgtaggcggggtgccgactggcggactctggcccagaaactccacctggacagccatctcagcttctttgcctccaagcccagccccacagccatgatcctcaacctgtgggaggcgcggcacttccccaacggcaacctcagccagctggctrcagcagtggctgggactgggccagcaggacggtggcttctttcacagtgttcggaggctgagtgctgaggccggccaggcngaacac

SEQ ID NO: 193 - DNA, 430 bp, Homo sapiens
  misc_feature (429): n equals a,t,g, or c
ttctggcggccgcaatccttgtgggacaaggcgttaaatcctggatcaaagacaaagtccaggaaccacgaccttttgttatctggctggaaaaaacacatcatattccggttgatgagttctacactttaaagcgagcagaacgcggaaatctagtgaaagaacagttggctgaagagaaaaatatcccacaatatttgcgttcacactggcagaaagagacggggtttgcctttccttccggtcacacgatgtttgctgccagttgggcactgctggccgttggtttgctgtggccgcgtcggcgaacgttaaaccattgctaatcttgctggtctggggcaaccgggagtcatgggaagccgcctgctgctcgggatgcattggccacgcgaactgggtagtagccaacgttgaattcgtggggcng

SEQ ID NO: 194 - DNA, 1036 bp, Homo sapiens
  misc_feature (34): n equals a,t,g, or c
  misc_feature (417): n equals a,t,g, or c
  misc_feature (1034): n equals a,t,g, or c
ggcgtataaaagagatcgatattcgagcgcaccnaktatagcaccagaccgatagtcagcgccagccctgccaacacggcacaggcaatccacaagcggtttttacggcgaatattcatgcagcctcctgctgttgcgcacacgtaaacgcgcctcacgcgcccgctgttgcgccacgccacgcagaattgcgcgatgttgcatcaccgagtgcacgaccaaaaccaccagcggaataacggtcatcaccaccgccagccagacaaaaaaggcgtaaccgcccattgcgaaaaattcattccaggaagcaaatgcaggggtcatttacggcctcttttcagtatcagttcactcacccacggacggcgtttttccatcagcaaaatcaaattacgcatccgcatcagcgtcagcgtnggcagacaggagcaggaagccaaaaatcgaccagcgcagcggcgaacgcatcgccggatcgatactttgctgcatccgcgttgatccctgatgcagggtgttccaccactccacggagtaatgaataatcggcagattcaccacgccaatcagcaccaggatacctgccgcacggcccgccagacggcggtcgtcgaaggcgtgccacagggcaatcacacccacatacaaaaacagcagcaccagttcagaagtcagacgtgcatcccatacccaccaggtgccccacatcggttttccccatgcagagccggtaaccagggcaataaaggtaaacacggcaccaatgggggccatcgccgccaccgccaggttggccattttcatytgccagacaaggccaataaacgctgccactgccattgatgcataaatgcccatygaccagatygccgcaggcacatgcaggtagataatgcggtagctatttccctgctgataatcagccggagcaaagccgratccccagatccagccgacggtaagcacgaccacactggcaattgccagccacggtataaaccagccacagatttgatacagccgtggtgggatcnca

SEQ ID NO: 195 - DNA, 451 bp, Homo sapiens
ctggaacgactgttccgtgacgatttgcaggacggcatcttgaacaattgatgttgttgccgttacccttgcccgccgttgtgctggcgaaggtgatggcgcactggatggtaaccggtctgccgttactcatcctttcgccactggtagcaatgctactgggaatggatgtttatggctggcaagtgatggcgctgacgctgctgctgggaacgcctacgcttggctttctcggtgcaccgggcgtggcgctgacagtgggacttaagcgcggtggtgtgctgctcagcatactggtgttaccgctgactatcccattactcatctttgccaccgccgcgatggacgcggcttctatgcattgcccgttgacggtatctggcaatttaggcgcgttgctggcargcaccgcgacattaagtccttttgcgacggcggcagcgttacgaat

SEQ ID NO: 196 - DNA, 488 bp, Homo sapiens
gagaggtctggcctcagttggagcaaccgggagaaggcaaagcaggcattcaaggaactgctgagggacaaggctgtcccctccaatgcctcatgggaacaggccatgaagatggtggtcaccgacccccgttacagtgccttgcctaaactgagtgagaaaaagcaggcattcaatgcctacaaggcgcagcgggagaaggaggagaaggaggaggcccggctaagggccaaagaggccaagcagaccctgcagcatttcctggagcagcatgaacgcatgacctccaccacccgctaccggcgggcagaacagacctttggggagctggargtctgggctgtggtccctgagagggatcgaaaagaggtttatgatgatgkcctcttcttcctggccaagaaggaraaggaacaggccaagcagctccggcgccgcaatatccaggccctaaagagcatcctggatgggatgagtagtgtcaactt

SEQ ID NO: 197 - DNA, 444 bp, Homo sapiens
cagcttcaagtgaagttaatctgaggtgaagcaaacagaaaattgtggaggttttgttggaatgaatctgaagtctgctgcagtaaaacacagaaggctttaaaatgttttcttgcataaaattcaaaacttttaagtagctgcttatgagaatagggaaggcagaaagctaatgtctgtctcaagatacaggacagctgtttgctcatcaacctcaactgtgtgtgcactgaggaacatggctcaagaaactaatcacagccaagtgcctatgctttgttccactggctgtggattttatggaaaccctcgtacaaatggcatgtgttcagtatgctataaagaacatcttcaaagacagaatagtagtatggtagataagccactgcaactctgtcagtagtctgtctgaatctttaccagttcaatgcacagatgcagtgt

SEQ ID NO: 198 - DNA, 610 bp, Homo sapiens
  misc_feature (583): n equals a,t,g, or c
  misc_feature (594): n equals a,t,g, or c
gcagatcagcttcatgagtggcagtggacagctgagctactgagttctagaaggcaccgggcattggtggggcagaacctcacgtggacccacgtggggaaagaaacagaggctccgtcacggggagttgtcgtgaccttgaacttggcatcatctttgaagaagctgaagggaaagaaggaatgacagagggagtgcctttccatccacatcggtcaagctggcatccagattggggacgcctgctgggaactctattgcctggaacatggaatccagccaaatggcgttgttcttgacactcaacaggatcagctggaaaatgcaaaaatggagcacacaaatgcatctttcgataccttcttctgtgagacaagagctgggaagcatgtgcctagagcactcttcgtggacttggagccaactgttatagatgggatccggacgggccagcaccgttcactcttcaccccgagcagctccttagcggaaaggaggatgctgccaacaattacgcscsaaggccgttactctgtggggtcggaagtcatcgacctgtgctgaaaaggacccggaactgcanacatgtgtggnttcaggatttgatttc

SEQ ID NO: 199 - DNA, 647 bp, Homo sapiens
  misc_feature (23): n equals a,t,g, or c
  misc_feature (38): n equals a,t,g, or c
  misc_feature (45): n equals a,t,g, or c
  misc_feature (49): n equals a,t,g, or c
  misc_feature (80): n equals a,t,g, or c
  misc_feature (637): n equals a,t,g, or c
ccgattcattaatgcagtggcangacaggtttcccgantggaaancggncagtagcgcaacgcaattaatgtgagttagntcactcattaggcaccccaggctttacactttatgcttccggctcgtatgttgtgtggaattgtgagcggataacaatttcacacaggaaacagctatgaccatgattacgccaagctcgaaattaaccctcactaaagggaacaaaagctggagctccaccgcggtggcggccgctctagaactagtggatcccccgggctgcaggaattccgcaaatattttgaggagctacaaccaggcgacagcctgttgactccccgccgcacaatgacagaggccgatattgttaactttgcttgcctcagcggcgatcatttctatgcacatatggataagattgctgctgccgaatctattttcggtgagcgggtggtgcatgggtattttgtgctttctgcggctgcgggtctgtttgtcgatgccggtgtcggtccggtcattgctaactacgggctggaaagcttgcgttttatcgaacccgtaaagccaggcgctgatcgtcgtcggcaagaractcactggcgagggggggcccggtacccaattcggccctangaaatgagaa

SEQ ID NO: 200 - DNA, 752 bp, Homo sapiens
aaaaccctgcaccgcgcccgtcaccgctatcgtcgcctgggacagtgaattttatgaacggttaccactactgtttccccacggtgatgcccgcagttggtttacctccagcccacaacttgccgaagaaacagcgtttcgcaacagttccatgcaggcggcctatctgatcgtcgcctgccgggcgctgggactggataccggcccgatgtcgggctttgaccgtcaacacgtggacgacgccttttttacgggcagcacgctgaagagcaatctgctgattaatatcggctatggcgatagcagcaagctttatgcgcgcctgccacgtctgtcctttgaagaagcctgcgggctgttgtaaggagcaaactatgaacattgtcgatcaacaaacttttcgcgatgcgatgtcctgcatgggcgcggcggtcaatattatcaccacggacggtccagccgggcgcgccgggttcaccgccagcgccgtctgcagtgtgaccgatacgccgcccacattactggtgtgcctgaatcgtggggcgtccgtctggccggcattcaatgaaaatcgaacgctgtgtgtaaatacacttagcgccgggcaggagccgctttcaaacctttttggcggcaaaacgcccatggaacaccgctttgccgccgcccgctggcagacggggttraccgatgcccgcaaytggaaragctctggtttcgtttactgccgtatcagccagtggttaccgtcg

SEQ ID NO: 201 - DNA, 474 bp, Homo sapiens
gactagttctagatcgcgagcggccgcccttttttttttttttttttttttttttttttttgaatatatataacatttattcataagttccaatgtcatttcttacttgattgtcaatgggcaatacacagtctgcatgctcattaagttccttcattgccaagatgctattataaggtgaggttatgacatcatcctcaccagaaggataaatggaagtcacaaatctgtatacttctgggaattcgtcttcaagcacctttaaaagaaatgtgccaagtccagatcctgttcctcctcccatggaatgtattataaagaaacactgcaagcaatcacagtgctctgccgactttctgaatttctctaaaatctcggtcttggkaaagactgccgaaaactttgtgacccacggcccaattatttcctgagccagaaatatcagtgatgagctgttycgkawcaaatacatct

SEQ ID NO: 202 - DNA, 1084 bp, Homo sapiens
  misc_feature (1005): n equals a,t,g, or c
  misc_feature (1008): n equals a,t,g, or c
  misc_feature (1038): n equals a,t,g, or c
  misc_feature (1056): n equals a,t,g, or c
  misc_feature (1067): n equals a,t,g, or c
gcgaccgcgggatagcaagctcccggagccggcggsawccaccatgacccaktcggtggtcgtacaggtcggccagtgcggaaaccagatcggctgctgcttctgggacctggcactaagggagcacgccgcggtcaaccagaaaggaatttatgatgaggcaataagcagcttctttagaaatgtggacaccagagtggttggtgatggtggaagtatttccaagggaaaaatatgttctttaaaagcacgagcagtcttgattgatatggaagaaggggtagtgaatgaaattctgcagggaccactgagagatgtatttgatacgaaacagctcatcactgatatttctggctcaggaaataattgggccgtgggtcacaaagttttcggcagtctttaccaagaccagattttagagaaattcagaaagtcggcagagcactgtgattgcttgcagtgtttctttataatacattccatgggaggaggaacaggatctggacttggcacatttcttttaaaggtgcttgaagacgaattcccagaagtatacagatttgtgacttccatttatccttctggtgaggatgatgtcataacctcaccttataatagcatcttggcaatgaaggaacttaatgagcatgcagactgtgtattgcccattgacaatcaatctttatttgacatcattagcaaaatcgacctcatggtgaattctggaaagttgggtacaactgtgaagccaaagagtctggttacttcaagttctggggctttaaaaaagcagcataagaagccctttgatgcaatgaataacattgtggcaaatttgctcctcaacctaacgagctctgcaagatttgaarggtccttaatatggaccttaatgaaatcagcatgaatttarttccttttcctcaacttcattatctcgtgtcaagcctaacacctctgtttacctgacagatgttaacattcctcctaaaaaaattggatcanatnttttcaaatgcctttaataaaaatcaccancttgcttcccggcaaaancccaaacacantctttaactccccctgt

SEQ ID NO: 203 - DNA, 682 bp, Homo sapiens
  misc_feature (61): n equals a,t,g, or c
  misc_feature (536): n equals a,t,g, or c
gcggcggcggcggcgccacctccgcctgctgctccgacccgctcccggcccgcggcggcgncaccagggcgcccggctcagccttcccggagcctcggcccggcctcatcgtgccggcttcgcgcgcgaacccggctttcgcatttgggaccctgcaggccctgaaaaggagcctttaaaagtcaattctactccatttggcaaagagggaactgaaatctggaaagtaaggacttgcccaaggtcactgacttagtggcagactagagacttgaactcaggtctccattcccagcagaaaaatatggctcaggagactaaccagaccccggggcccatgctgtgtagcacaggatgtggcttttatggaaatcctaggacaaatggaatgtgttcagtttgctacaaagaacatcttcagaggcagcaaaatagtggcagaatgagcccaatggggacagctagtggttccaacagtcctacctcagattctgcatctgtacagagagcagacactagcttaaacaactgtgaangtgctgctggcagacatctgaaaaatcaagaaatgtgcctgtggtgccttgcctgtaactcacaaatgacagaaatgagcatttcaagagaggacaaaataactaccccgaaaacagaggtgtcagagccagttgtcactcagccc

SEQ ID NO: 204 - DNA, 767 bp, Homo sapiens
  misc_feature (671): n equals a,t,g, or c
  misc_feature (697): n equals a,t,g, or c
gtacatcytggtcagwcagtgacctgttctccagggaccagaagagtctgctgccccctcctaaccagtcccaactgctggaggaattcctggataactttaaaaagaatacagccaatgatttcagcaacgtccctgatatcacaacaggtctgaaaaggagtcagacagatggcactctggatcaggtttcccacagggagaaaatggagcagacattcaggagtgctgagcagatcactgcactgtgcaggagttttaacgacagtcaggccaacggcatggaaggaccgcgggagaatcaggatcctcctccgaggcctctggcccgccacctgtctgatgcagaccgcctccgcaaagtcatccargagcttgtggacacagagaagtcctacgtgaaggatttgagctgcctctttgaattatacttggagccacttcagaatgagacctttcttacccaagatgagatggagtcactttttggaagtttgccagagatgcttgagtttcagaaggtgtttctggagaccctggaggatgggatttcagcatcatctgactttaacaccctagaaaccccctcacagtttagaaaattactggtttcccttggaggctctttcctttattacgcggaccactttaaactgtacagtggattctgngctaaccatatcaaagtacagaaggntctggagcgagctaaaactgacaaagccttcaaggcttttcttggacgccccggaaccccaccaagcaag

SEQ ID NO: 205 - DNA, 511 bp, Homo sapiens
  misc_feature (1): n equals a,t,g, or c
  misc_feature (10): n equals a,t,g, or c
  misc_feature (17): n equals a,t,g, or c
  misc_feature (99): n equals a,t,g, or c
  misc_feature (481): n equals a,t,g, or c
  misc_feature (500): n equals a,t,g, or c
ncctttaaantgaaatncaactttcgaacaatggggctttcttgctcaacttccacctggcaaccattgatgcagatttcagaagaggattgccttgcncgtattgccgaatcccatcaacattgcgctggataaaactcaaggtgtgaacagcggtgatagaaaacaccgccggtcagggcagtaacttagggtttaaattcgaacatctcgcggcgattatcgacggcgtggaagataaatcccgcgtcggcgtctgcattgatacctgccatgtttcgctgccgggtatgatttgcgtactccagmcgaatgcgagaaaacattcgcggwttttgcccgtactgtcggctttaagtatctgcgcgggatgcaccttaacgatgcgaaaagcacctttggcagccgcgttgaccgccatcatagcctcggtgaaggcaatatcggtcatgaatgcgttccgtggtatcatgcaggacgnaccgtttcgacgggcattnccgctgatcct

SEQ ID NO: 206 - DNA, 583 bp, Homo sapiens
  misc_feature (549): n equals a,t,g, or c
gtaaatgctggacaagtagtcacaggaaatctggccccacatttccttgccctgtgtaagcccaattatacagcacttggatgtcagcagtatacacaattcatcagtggggaagaggcctgtactggcaacccagatctcatcatgagagcccgaaaaacctttccatccaaagaagcagctctcagtgtctatgcagctatgtatctgaccatgtacatcaccaacacaatcaaagccaagggaaccagacttgctaagccagttctatgcttgggcttaatgtgtttggcatttcttactggactcaacagagtagcagaatatcgaaatcattggtcagatgttatagcaggctttctggttggaatatctatagcagtatttctggttgtgtgcgtggtgaataatttcaaagggagacaagcagaaaatgagcatatacacatggataatctggsacasatgccaatgatcagcattccccgagtagaaagtccyytggraaagaaccccatcactsccttcgcagaagtcacatgatatcgnagcagatggkttttcactgcattggacatcatcc

SEQ ID NO: 207 - DNA, 731 bp, Homo sapiens
  misc_feature (403): n equals a,t,g, or c
  misc_feature (619): n equals a,t,g, or c
  misc_feature (726): n equals a,t,g, or c
  misc_feature (729): n equals a,t,g, or c
gcccgctgttgcgtgctgccagcgggaactgtgtaggggtagattttcgctgcagtgttccccgagcctgttagacgcagcgcgccgggagactgagagaggaaaggatagaggaagtgctgccctaggctgcatgagtcgaagcaagcgtgtttccttcccgccaggcaagtgcccttagaaaccgggccccgcccccttcctggcctgcattcccatcccctctcccggggcggaggtgaggacctccttggttcctttggttctgtcagtgagccccttccttggccatgaagctcgtgaggaagaacatcgagaaggacaatgcgggccaggtgaccctggtccccgaggagcctgaggacatgtggcacayttacaacctcgtgcaggtgggcgacanctgcgcgcctccaccatccgcaagtacagacagagtcctccacgggcagcgtgggcagcaaccgggtccgcactaccctcamtctctgcgtggaggccatcgacttcgactctcaagcctgccagctgcgggttaaggggaccaacatccaagagaatgagtatgtcaagatgggggcttaccacaccatcgagctggagccaaccgccagttcancctggccaagaagcagtgggatagtgtggtactggagcgcatcgagcaagcttgtgaccagcttgagcgctgatgtggcgctgtgtcatgcagaagctcgccatatntgnta

SEQ ID NO: 208 - DNA, 512 bp, Homo sapiens
  misc_feature (363): n equals a,t,g, or c
  misc_feature (433): n equals a,t,g, or c
  misc_feature (439): n equals a,t,g, or c
  misc_feature (491): n equals a,t,g, or c
  misc_feature (509): n equals a,t,g, or c
cccacgcgtccggaggaacatggctcaagaaactaatcacagccaagtgcctatgctttgttccactggctgtggattttatggaaaccctcgtacaaatggcatgtgttcagtrtgctataaagaacatcttcaaagacagaatagtagtaatggtagaataagcccacctgcarcctcygtcagtagyctstckgaatctttaccagttcaatgcacagatggcagtgtgccagaagcccagtcagcattagactctacatcttcatctatgcagcccagccctgtatcaaatcagtcacttttatcagaatctgtagcatcttctcaattggacagtacatctggtggacaaagcagtanctggaaacagaagatgtgcaggcttcagtatcagacacagcacagcagccatctgaagagcaagcaagtntcttgnaaaccgaacaaaaagatcgctgttcatggcagagaaatgggcttatgggttnatccgggtggatgttcgnggg

SEQ ID NO: 209 - DNA, 683 bp, Homo sapiens
  misc_feature (571): n equals a,t,g, or c
  misc_feature (589): n equals a,t,g, or c
ggagagcaccatcgtgtctggggcctgctgccgcttcagccccccagtgcggaggctggtccgcttcctgggggtctactccttcggcctcttcaccacgaccatcttcgccaacgcggggcaggtggtgaccggcaatcccacgccacacttcctgtccgtgtgccgccccaactacacggccctgggctgcctgccaccttctccggatcggccargtcccgaccgctttgtcactgaccagggtgcctgcgctggcagtcccagcctcgtggccgccgcgcgccgcgccttcccctgcaaggatgcggccctctgcgcctacgcggtcacctacacagcgatgtacgtgactctcgtgttccgcgtgaagggctcccgcctggtcaaaccctcgctctgcctggccttgctgtgcccggccttcctggtgggcgtggtccgcgtggccgagtaccgaaaccactggtcggacgtgctggctggcttcctgacaggggcggccatcgccacctttttggtcacctgcgttgtgcataactttcagagccggccamcctctggccgaagntctctccctggggaaganctggggcaagccccacatggatagcccctcgaaaagaaccgaagtctgmaggcggattccamaacgggaagggtcacccatccaaattggaaaa

SEQ ID NO: 210 - DNA, 706 bp, Homo sapiens; identical to SEQ ID NO: 61

SEQ ID NO: 211 - DNA, 1151 bp, Homo sapiens
  misc_feature (1127): n equals a,t,g, or c
  misc_feature (1138): n equals a,t,g, or c
  misc_feature (1139): n equals a,t,g, or c
  misc_feature (1146): n equals a,t,g, or c
  misc_feature (1147): n equals a,t,g, or c
caaggatctccatcacttttgacccgtttctttatctgccggtgcccttgccacaaaagcaaaaggttctccctgtcttttattttgcccgagagccccacagcaagcccatcaagttcctggtgagcgtcagcaaggagaactccactgcgagcgaagtattggactccctctctcagagtgttcatgtgaagcctgagaacctgcgtttggcggaggtaattaagaatcgttttcatcgtgtgttcctaccctcccactcactggacactgtgtccccatctgatacgctcctctgctttgagctgctatcctcagagttggctaaggagcgggtagtggtgctagaggtgcaacagcgcccccaggtgcccagcgtccccatctccaagtgtgcagcctgccagcggaagcaacagtcggaggatgaaaagctgaagcgctgtacccggtgctaccgtgtgggctactgcaaccagctctgccagaaaacccactggcctgaccacaagggcctctgccgacctgagaacattggctaccccttcctggtcagtgtacctgcctcacgcctcacttatgcccgcctcgctcagttgctagagggctatgcccggtactctgtgagtgtattccagccaccctttcagccaggccgcatggccttggagtctcagagccctggctgcaccacactgctctccacaggttccctggaggctggggacagcgagagagaccccattcagccacctgagctccagctggtgacccctatggctgagggggacacagggcttccccgggtgtgggcagcccctgaccggggtcctgtgcccagcaccagtggaatttcttctgagatgctggccagtgggcccattgaggttggctccttgccagctggcgagagggtgtcccgacccgaagctgctgtgcctgggtaccagcatccaagtgaagctatgaatgcccacacaccccagttcttcatctataaaattgattcatccaaccgagagcagcggctagaggacaaaggagacaccccactggagctgggtgacgactgtagcctggctctcgtctggcggaacaatgagcggttgcaggagtytttaccgttnaagattccggnntccgttnnagtt

SEQ ID NO: 212 - DNA, 619 bp, Homo sapiens
  misc_feature (610): n equals a,t,g, or c
  misc_feature (618): n equals a,t,g, or c
gggaacaaaagctggagctccaccgcggtggcggccgctctagaactagtggatcccccgggctgcaggaattcggcacgaggttttttttttttttttttttttctacttacttattatttatttttaaaatatatttaaacagcagcagtcacttccaaaatgcaaaaaaaattacaatttttagaataaaattataatgtttataatgcgggtcagaagaattgaaggtacaacagaatcaaatcacgcagcactggaggcggctggagaagccaaagcccactggtcaggggtccaagctgacaagaagtcccaacctgagaggtctccacacccaaatcatacccctcagcttcccactgacagagccagtgtcctctgggttagagaaggagaagcggcaaggagctggccctctgtgtgggtgtcccaaacccagtcccccccatcagccagggacctgctaatccacctcctccatgttgctgtaggtgggggctggccgatccacagggggggcgaagcgttcaggggctgtccgcgtgggggccacctcgggggcctggccaggarcctagtccgggagcttttccataaagytttcgtnaagttttnc

SEQ ID NO: 213 - DNA, 1363 bp, Homo sapiens
  misc_feature (1278): n equals a,t,g, or c
  misc_feature (1304): n equals a,t,g, or c
  misc_feature (1316): n equals a,t,g, or c
  misc_feature (1354): n equals a,t,g, or c
  misc_feature (1361): n equals a,t,g, or c
gcggcacgagccgggtcctgcaggggcgacgcgaggcctcttttgaaagatgcggccctgaccctgtgaacctcgcgcagagcggcctgaagcgagaggttgaggctgggaggtgggagcaacggcggcggcggccgcctgcgagcccccggcctgaggcgcagcagcagctgcccgtcttcccacatagagggcaggaaggacaactttggtgagaaaatggctagcaacaatcattggtttcagagttcgcaggtccccagctttgcccagatgctgaaaaagaacctgccagttcaaccagcgacaaagacgataactacacccacaggatggtcctcagaaagttacggcctgtccaagatggcatccaaggttacgcaagtaacgggtaattttccagagccgttgctttccaagaatctttcatctatttcaaatcctgtccttcctccaaaaaaaatacctaaggaatttataatgaaatacaaacgtggagagataaatcctgtgtcagccttgcaccagtttgcacaaatgcagcgagttcagcttgaccttaaggaaactgtgacaacaggtaatgttatgggaccatattttgccttttgtgctgtggtggatggtattcagtacaagactgkactgggacaaaataaaaaggagtctagatccaatgcagcaaaattagctcttgaatgagcttctacaactggatgaacctgaaccacgaattttagaaacatcaggtcctcctcctttccctgcagaacctgttgttttatctgaactagcatatgtttcaaaagtacattatgaagggagacatattcaatatgcaaagatttcacagatcgttaaagaaagatttaatcaactaatttctaatcgttcagaatacctgaaatatagcagttcattggctgcttttataattgaaagagctggacaacatgaggttgtagctataggcacaggtgaatacaattacagccaggacattaagccagatggaagagtattgcatgacactcatgctgttgttacagcaagaaggtctcttcttagcaaaaatcctgctatgatggaaaaatcaatattttgtacagaaccaacttctaatctactcactcttaaacagaatatcaacatttgcctttacatgaaccagttgcctaaaggatcagcccagattaagtcacagttaccgtcttaatccacattctatatctgcatttgaagccaatgaagaactctgtctccacgtggctgttgaangcaaaatttatctgactggttactgncctaaagatggnggtaataggaataagcagtatgtcctcaagtgacaaantgaccanat

SEQ ID NO: 214 - DNA, 474 bp, Homo sapiens
  misc_feature (209): n equals a,t,g, or c
  misc_feature (473): n equals a,t,g, or c
cttacttcggctgtctccgctgccctccagcggagacgcagctcctcaggcgcccggcggtatttgttgggtcggcggcgtcagggattcgcagtggcctgtggtcggcgtcgtccggccactggtgcgcccccgcgrcaggcagagctcacgctcctgtcccccggctggtccggggtctgggcgccgcgtcgacggcggctccgcangacgcgcagaccgggccgcagcccatgccccgagcggactgcattatgaggcacctgccttacttctgccggggtcaagtggtgcggggcttcggccgcggctccaagcagctgggcatccccacagctaattttcctgagcaagtggtagataatcttccagctgatatatccactggtatttactatggktgggccaatgttggaagtkgagattccataagawggtggtgarcataaggatggaaccatattaccagaatnc

SEQ ID NO: 215 - DNA, 747 bp, Homo sapiens
  misc_feature (164): n equals a,t,g, or c
  misc_feature (699): n equals a,t,g, or c
agctcagaaattaaccctcactaaaagggaacaaaagctggagctccaccgcggtggcggccgctctagaactagtgggtcccgcgcaagtcttttgccatccagattacgccggagagattggccttatcatgccgtatgaaaaagacttctgcgccacttgncaamccctgcgcgtttacctccattggtaaactccatctctgcctgtttggtgaaggcggcgttaactgcgcgatctgctggaaracgccttttaagaatgcctggctgaaacggctgcgggaagggatgccggagtgcgtcgctgcgccaaaagttcgtagtagcggatcgatagagccctcgccatccattacgctgaattatcctcgtcagtctttcgatactgcgcattttccggtggaagaaaaagcggcgattgcgcaattacgccagttttgccagaacggtgccggagaatatgagcaacaacgagattttccggcagtggaaggcaccagccgtttgtcggccagcctggcaacgggcgggttatcgcytcgccagtgcttgcatcgcttgttggctgaacagcggcaggcttgggacggtggggccggtagtgtctggcttaatgagcttgatctggcggatttttaccgtcacctgataacgtattcacccctcgttgtgtaaacatcgtccattttatttgcntggacggatcgtgtacagtgggcagagcaattcccgacatttacaggc

SEQ ID NO: 216 - DNA, 1029 bp, Homo sapiens
  misc_feature (1028): n equals a,t,g, or c
gggcttttctcgtcagctgccctgaggggagagcggactgtgccagtgagtcggcgtgcagcagcgacagcctggacgaggccagatcgtccggctcggaagggacgccggcagacacgggtgacctctcgcctggccacggcgcgtcagcgccctcggtgtccagagaggctcgccaaacggtgccgccctgacggtcaggctgcacacacagagcgtgtcggagtgcatcacggaggacggcaggactgtggccgtgggggacatcgtctggggtaagatccatggttttccttggtggccggcgcgtgttcttgacatcagtctcggccagaaggaggacggagagccgtcttggcgagaagcgaaggtctcgtggtttggttctccgactacgtcktcttgtctatttcaaaactctcccctttctctgaatttttcaaactgagatttaatcgtaagaagaaggggatgtatcggaaagctataaccgaggctgcaaatgccgcaagacacgtggccccggaaatcagggagctcttaacccagtttgaaacgtaactggttccctgaccaggtcaccgacgatgagggcgcacctgctgtcctggagcttccgatctctgttcggggaccctgtgagccttctggccggctgcgtgcagagcccactgggcacggtggtcggcctggtgtgaggccccccggggaccggcagtgtgtccagggaggggatggccctgagcccagcggctcctcccgctgagtgtatttcttcccaccactcagcgcatggctgccctggctcacgaggcagtcgggactcgtgacttgctggctgctggctgctgctgcctcgcgcgctggggttccatggaggaactgggcctgccgcccggctcacctgctgccgcatgctggggtcccatggaggaaccaggcctggcgccccggctcgcccagcggctggtgtgggcaagctgttcctgcctcgcaatgtcctggaggcagctgtctcgcaaactcant

SEQ ID NO: 217 - DNA, 817 bp, Homo sapiens
  misc_feature (210): n equals a,t,g, or c
  misc_feature (218): n equals a,t,g, or c
  misc_feature (220): n equals a,t,g, or c
  misc_feature (750): n equals a,t,g, or c
  misc_feature (796): n equals a,t,g, or c
  misc_feature (798): n equals a,t,g, or c
cctacaccatctaccggcctgacgagggttactgccaggcccaggcccccgtggctgcggtcctgctcatgcacactgcctgcggagcaagccttttggtgcctggtgcagatctgcgacaagtacctcccaggttactacagtgcagggctggaggccattcagctggacggggagatcttttttgcactcctgcgccgggcctccccntggcgcantncccacctgcggcggcagcgcattgaccctgtgctctacatgacggagtggttcatgtgcatcttcgcccgcaccctgccctgggcgtcggtgctgcgtgtctgggacatgtttttctgtgaaggcgttaagatcatcttccgggtggccctggtcctgctgcgccacacgctgggctcagtggagaagctgcgctcctgccaaggcatgtatgagaccatggagcagctgcgtaacctgccccagcagtgcatgcaggaagacttcctggtgcatgaggtgaccaatctgccggtgacagaagcactgattgagcgggagaatgcagcccagctcaagaagtggcgggaaacgcggggggagctgcagtatcggccctcacggcgactgcatgggtcccgggccatccacgargagcgccggcggcaacagccacccctgggcccctcctccagcctcctcagcctccctggcctcaagarccgagctyccggcagctggaggggccccgtccccgccgcccccgtccgnagagccagtgctgggcctgccccaaggcctgtgggtcacttgctgnanggactgcatccatcccttt

SEQ ID NO: 218 - DNA, 442 bp, Homo sapiens
  misc_feature (351): n equals a,t,g, or c
gtaatatgtgaaaggatttgataatgcaatggaattggttaaaaacatgacagaacgtattccccagttcaaatcagtggttgaagaaattcagaaacagaaaatctgtgggagcttaactttgcagcatcacatgctagaacctgttcagcggattccccggtatgagatgctccttaaggactatctaaggaaattgcctcctgattccctggactggaatgatgctaaaaaatcacttgaaattatatctacagcagcaagccattctaatagtgcaataaggaaaatggagaacctaaagaaactcttagagatttatgaaatgttgggagaagaagaagacattgnaaacccttcaaatgaactaatarmwgaaggacagatcctcaaactagctgctcgaaacacttcagcacaagaacgctaccttttcttattc

SEQ ID NO: 219 - DNA, 617 bp, Homo sapiens
gggctgaaagcacgttaccagacaatgagcatcttgcccatggagctatawaaagagtttgcagagtatgtcaccaaccattatcggatgctgtgtgcagtcttggagcccgccctgaatgtcaaaggcaaggaggaggttgccagtgcactagttcacatcctgcagagtacaggcaaggccaaggacttcctttcagacatggccatgtctgaggtagaccggttcatggaacgggagcacctcatattccgcgagaacacgcttgccactaaagccatagaagagtatatgagactgattggtcagaaatacctcaaggatgccattgragaattcatccgtgctctgtatgaatctgaggaaaactgcgaggtagaccctatcaagtgcacagcatccagtttggcagagcaccaggccaacctgcgaatgtgctgtgagttggccctgtgcaaggtggtcaactcccactgcctcccatcttgctcctgcggtccctccttccctgtctctctcacccctgtttccacaccctcacctcctaccacccccctcagcatgttccctggaagctgagggtctctggggctcagtcccggtctctctctttctcc

SEQ ID NO: 220 - DNA, 522 bp, Homo sapiens
  misc_feature (454): n equals a,t,g, or c
ttgcacagacccacgccgagcgccactgcctcctcccgagtctggcagtctccctgagccagcagccagtccaccagcttgctcccgggaagcactgacttgtaggtcttcaggtggtaatcacggtctttgatcaccggggtgtagaggctgtgaagacggcagtaaagcctcacacccttggacatgatgtcctccagctcacttcgggccttgtaggtgccatcgtcgtagcggaagcgatacatcacctgctcattcttgaactggtgcttgtcggaaacatggtggatgatgccattctccaacagggcttggcccaagttgactccttcttccgtcttgctgatttcaccaatttctaggagccaggcaacgaactcattgccaagaaagcacttggggacagtgctcagtttctccggcggtccttgatgaggttcaccttcttgtncatcatcatgtggtacagcttctcccccttctccgcaatcatgacgtaggcatcacgctccatgccca

SEQ ID NO: 221 - DNA, 753 bp, Homo sapiens
  misc_feature (661): n equals a,t,g, or c
  misc_feature (738): n equals a,t,g, or c
  misc_feature (740): n equals a,t,g, or c
gcggccgcccgggagtccgagcgccmtgcgcctccgcctctgcgtcctcaacgagatcttgggcaccgagagggactacgtgggcaccttgcgcttcttgcagtcggcattcctgcatcgcatccggcagaacgtggccgactcagtggagaagggcctcacggaggagaatgtcaaggtcctgttctcgaacatcgaagacatcctggaagttcataaggatttcttggccgccttggagtattgtttacacccggagccgcagtctcagcatgaacttgggaatgttttcttaaaattcaaggacaagttctgcgtgtacgaggagtattgcagcaaccatgagaaagccctgaggctgctggtggagctgaacaagatccctaccgtgcgcgccttccttttgagctgcatgcttctgggaggccggaagaccacggacatccctttggaaggctacctgttgtctccgatccagaggatctgcaagtacccgctcctccttaaggagctggccaagaggactcccggcaagcacccagaccaccccgcggtccagagtgccctgcaggccatgaagaccgtttgctccaacatcaatgagaccaagcggcagatggagaagctggaaccctggagcagctgcagtcccacatcgaangctggggagggttccaaacttcacagacattttggaatcagttcctcctgcaggggactttgtttaaaaaatttttngngggggaaaatttc

SEQ ID NO: 222 - DNA, 342 bp, Homo sapiens
  misc_feature (134): n equals a,t,g, or c
  misc_feature (324): n equals a,t,g, or c
  misc_feature (342): n equals a,t,g, or c
ggcacgagctcgtgccgaatcggcacgagaaggagtgcgagcactgcgactgcctgcagggcttccagctcacgcactcgctgggcggcggcacgggctcaggcatgggcacgctgctcatcagcaagatccgngaggagttcccggaccgcatcatgaacaccttcagcgtcatgccctcgcccaaggtgtcggacacggtggtggagccctacaatgccacactgtcggtgcaccagctggtggagaatacagackagacctactgcatcgacaacgaggcgctctatgacattgcttccgcaytctgaagctgacaaacgnccaactaagggggacctn

SEQ ID NO: 223 - DNA, 1393 bp, Homo sapiens
ggccgttccggctgcggctccgctgccggtagcgccgtcccccgggaccacccttcggctggcgccctcccatgctctcggccacccggagggcttgccagctcctcctcctccacagcctctttcccgtcccgaggatgggcaactcggcctcgaacatcgtcagcccccaggwggccttgccgggccggaaggaacagacccctgtagcggccaaacatcatgtcaatggcaacagaacagtcgaacctttcccagagggaacacagatggctgtatttggaatgggatgtttctggggagctgaaaggaaattctgggtcttgaaaggagtgtattcaactcaagttggttttgcaggaggctatacttcaaatcctacttataaagaagtctgctcagaaaaaactggccatgcagaagtcgtccgagtggtgtaccagccagaacacatgagttttgaggaactgctcaaggtcttctgggagaatcacgacccgacccaaggtatgcgccaggggaacgaccatggcactcagtaccgytcggccatctacccgacctctgccaagcaaatggaggcagccctgagctccaaagagaactaccaaaaggttctttcagagcacggcttcggccccatcactaccgacatccgggagggacagactttctactatgcggaagactaccaccagcagtacctgagcaagaaccccaatggctactgcggccttgggggcaccggcgtgtcctgcccagtgggtattaaaaaataattgctccccacatggtgggcctttgaggttccagtaaaaatgctttcaacaaattgggcaatgcttgtgtgattcacaatcgtggcatttaaagtgcacaaagtacaaaggaatttatacagattgggtttaccgaagtataatctataggaggcgcgatggcaagttgataaaatgtgacttatctcctaataagttatggtgggagtggagctgtgcggtttcctgtgtcttctggggtctgagtgaagatagcagggatgctgtgttcacccttcttggtagaagctaaggtgtgagctgggaggttgctggacaggatgggggaccccagaagtcctttatctgtgctctctgcccgccagtgccttacaatttgcaaacgtgtatagcctcagtgactcattcgctgaaatccttcgctttaccaaatctagacatacataaggggctttctctcccttttcagccctctctgtgcagagaaaagatgtgagtccgcttgatgaattctaatgctttgcttagagctatgagaaatgtttgttttaataaaaacctacagtccaataaaaaaaaaaaaaaaaaaaaaaaaaaaaaaaaaaaaagggggg

SEQ ID NO: 224 - DNA, 352 bp, Homo sapiens
ggcgaaccccatagagaaaaatcccagttgtgtcttgtgaatgagttagtttgtttcagcaagatccagcttgagtataggcttttgtgtgagcaaggtccagctcactgtaaggtaaatattgtccatactgcttgtgcatttataacccacctggaatgttctctattttttatactcttgaaagtggtgctgtaattcaaaatacatgttttcaaactgatgaggtgtcttaaacaaaaactatacttagacaagatatagawttttgaagtgctctttttcatcctgccaagggtcaaagaaawawgkgtgcttttggaaaattgggggttagktttttagagtcctt

SEQ ID NO: 225 - DNA, 1094 bp, Homo sapiens
  misc_feature (966): n equals a,t,g, or c
  misc_feature (1025): n equals a,t,g, or c
  misc_feature (1064): n equals a,t,g, or c
  misc_feature (1073): n equals a,t,g, or c
ggaggaagccaggcggctggcggaggaggagagacggaggaggccgagaccggagcgccgctcgccgcagacttacttccccggctcagcagggaaaggttcctagaaggtgagcgcggacggtatgcaaagttgtgaatccagtggtgacagtscggatgaccctctcagtcgcggcctacggagaaggggacagcctcgtgtggtggtgatcrrcgccggcttggctggcctggctgcagccaaagcacttcttgagcagggtttcacggatgtcactgtgcttgaggcttccagccacatcggaggccgtgtgcagagtgtgaaacttggacacgccacctttgagctgggagccacctggatccatggctcccatgggaaccctatctatcatctagcagaagccaacggcctcctggaagagacaaccgatggggaacgcagcgtgggccgcatcagcctctattccaagaatggcgtggcctgctaccttaccaaccacggccgcaggatccccaaggacgtggttgaggaattcagcgatttatacaacgaggtctataacttgacccaggagttcttccggcacgataaaccagtcaatgctgaaagtcaaaatagcgtgggggtgttcacccgagargargtgcgtaaccgcatcaggaatgaccctgacgacccagaggctaccaagcgcctgaagctcgccatgatccagcagtacctgaaggtggagagctgtgagagcagctcacacagcatggacgaggtgtccctgagcgccttcggggagtggaccgagatccccggcgctcaccacatcatcccctcgggyttcatgcgggttgtggagctgctggcggagggcatccctgccacgtcatccagctagggaaacctgtccgctgcattcactgggaccaggcctcagcccgcccagaggccctgagattgagccccggngtgagggcgaccacaatcacgacactggggagggtggcagggtggagaggagccccggnggggcaggtgggatgaggatgagcagtggtcggtggtgntggagtgcnaagactgtgaactgatcccgg

SEQ ID NO: 226 - DNA, 1527 bp, Homo sapiens
gggaaagtttgacgagctggacatgtcccctggggaccccaagtggctggacgtgattgagcgtgacctgcaccggcagttcccattccatgagatgtttgtgtcccgggggggccacggccagcaggacctattccgtgtgctgaaggcctacacgctgtaccggcccgaggagggctactgccaggcccaggcgcccattgccgctgtcttgctcatgcatatgcctgctgagcaagccttctggtgcctggtacagatctgtgagaagtacctgcccggctactacagcgagaaactggaggcgatccagctggacggggagatccttttctcgctgttgcagaaggtgtcgccggtggcccacaagcacctcagccgtcagaagatcgacccgctcctytatatgacagaatggttcatgtgcgccttctcccgaaccttgccctggagctctgtgctgcgtgtytgggacatgttcttctgtgaaggggtcaagatcatcttccgggtggggctggtgctgctgaagcacgcgctgggctcccctgagaaggtcaaagcctgccagggccagtacgagaccatcgagcgactgcggagcctcagccccaagatcatgcaggaggcctttctggtccaggaggtggtggagttgcccgtgacagagcgccagattgagcgcgaacacctcattcagctgcggcgctggcaggagacccggggtgagctgcagtgccgctccccgcccaggctgcatggtgccaaggctatcttggatgcagaacctggtccccggcctgccctacaaccttcaccatccatccgcctgcccctagatgcccccctccctggctccaaagccaagcccaagccacccaagcaggcccagaaggagcagcggaaacagatgaaggggagagggcagctggagaagcccccagccccaaatcaagccatggtggtggccgctgcaggagatgcatgtcccccacagcatgtgcccccgaaggactcagcccccaaggactcagcccctcaggatttggctccccaggtctcagcccaccaccgctcccaggagagcttgacgtcccaagagagtgaggacacctacttgtaaccctggcagctaaggcctccagggcggggtctccatataactacacggttcatgaactgacattccacatcctgcccaccctctgagggccaagctgcctggccactgggctgggctggagtctggctggtccaacacagattctgcctggtccaacacagattctgcctgagcctccttatttattttctttacagtggcactcaggctggcccagccagggcaggcagaagctagggcctggggggtggggcctccttcagccccctcctcctgggggatgctccccagggttagggtgctggtgtgaggggaaagggtggggtgttctttgtgtaaaatagaaacatggttttgtacagaaataaacagccttgtatagagaaaaaaaaaaaaaaaaaaaa

SEQ ID NO: 227 - DNA, 1233 bp, Homo sapiens
  misc_feature (55): n equals a,t,g, or c
agctgtgtgagcggcacccacagcatggacctggtggccctggcaccctttgggnagtataccgtgctgccggggctggactgcaccttttctaagggctatcaaggactcacaaactgcatgatggccgccctgccggaggacactgtagtttttgagaagcctgtgaagaccatccactggaacgggtccttccaggaggcagcctttcccggggagacctttccagtgtcggtagagtgtgaggatggagaccggttcccggcgcaccatgtcatcgtcaccgtgcccttaggttttcttagggaacatttggacaccttctttgaccctcccctgccggctgagaaggcagaagcaatcaggaagataggctttgggaccaacaacaaaatcttcctggagtttgaggagcccttctgggagccagactgccagctgatccagctggtgtgggaggacacgtcgcccctggaggatgctgcccctgagctacaggacgcctggttccggaagctcattggctttgtggtcctgcctgcctttgcgtctgtccacgttctctgtgggttcattgccggacttgagtctgagttcatggagactctgtcggatgaagaagtacttctgtgtctcacccaagtgctccggagagtgacaggaaacccacggctccccgcgcccaagagcgtcctgcggtctcgctggcacagcgccccgtacactagggggtcctacagctacgtggccgtgggcagtactgggggcgacctggacctgctggctcagcccctccctgcagacggcgccggcgcccagctccagatcctgtttgcgggggaagccacacatcgcacgttttactccacgacgcacggggctctgctgtcgggatggarggaggccgaccgcctcctcagtctgtgggccccgcaggtgcagcagcccaggccgaggctctagctgggcccagcctactctgttccacccgtgtcgggggtaggctgggaccgtcatttcttctgacagatttcagtctggcttgaaatttggggatgttaatgagggtcctctggtttttggtaaccagggccaccttctcagttcttgtgtctgttattggagtctggccagggttgacttgagctgagacaccagatgctcacggagatgctggacacataaagcaagttacagccacaaaaaaaaaaaaaaaaaaaaaaaaaattactg

SEQ ID NO: 228 - DNA, 832 bp, Homo sapiens
  misc_feature (824): n equals a,t,g, or c
gggtcgcggtcctcggagcgcttctgcagcccgggcaaaggccgggctgygggctctgcagcyctccaggtgggggacttgctgttctcctgcccggcctatgcctacgtgctcacggtcaacgagcggggcaaccactgcgagtactgcttcaccaggaaagaaggattgtccaaatgtggaagatgcaagcaggcattttactgcaatgtggagtgtcagaaagaagattggcccatgcacaagctggaatgttctcccatggttgtttttggggaaaactggaatccctcggagactgtaagactaacagcaaggattctggccaaacagaaaatccacccagagagaacaccttcggaaaaattgttagctgtgaaggagtttgaatcacatctggataagttagacaatgagaagaaggatttgattcagagtgacatagctgctctccatcacttttactccaagcatctcgaattccctgacaatgatagcctcgtagtactctttgcacaggttaactgtaatggcttcacaattgaagatgaagaactttctcatttgggatcagcgatatttcctgatgttgcattgatgaatcatagctgttgccccaatgtcattgtgacctacaaagggacccgkgcagaagtcagagctgtacaggaaatcaagccgggagaggaggtttttaccagctatattgatctcctgtacccaacggaagataggaaatgaccggttaaggrgawtcttatttctttacctgtgrgtgccagggggtgtaccaccagggacagggwtaagggccaggtgggaantccggagg

SEQ ID NO: 229 - DNA, 335 bp, Homo sapiens
  misc_feature (219): n equals a,t,g, or c
  misc_feature (331): n equals a,t,g, or c
ttcagagggacggaatgtggtaagataatgatcwactgtagagccaggatccaggaaaggcagcataagtccacaattttagggctcatgagattggtgtatcttagagggtggtaatggcagtgtagcggtcataagccataacagccaaaagaagcatcagagccagcagtgatgtmwgaagaaawttgtgtggcacaacagccatagaatggactngctgcagacaggtagtkgaggcacttgggtacggtggtgcagatgagcatgagtcatgaggaagtgstgagaggaggtcatgggtttgggctggtgtcagtagatgagagancata

SEQ ID NO: 230 - DNA, 824 bp, Homo sapiens
  misc_feature (5): n equals a,t,g, or c
  misc_feature (6): n equals a,t,g, or c
  misc_feature (15): n equals a,t,g, or c
  misc_feature (19): n equals a,t,g, or c
  misc_feature (25): n equals a,t,g, or c
  misc_feature (110): n equals a,t,g, or c
cctcnnggacctcangctnatctgnaccaccgtacccargatggccttcaactacctgtctggcagcaagtccatttctatggctggttgtgccacacaaattttcttcnatacatcactgcttggctctgaatgctttcttttggctgttatggcttatgaccgctacactgccatttgccaccctctaagatacaccaatctcatgagccctaaaatttgtggacttatgactgccttttcctggatcctgggctctacagatggaatcatttatgctgtagccacattttccttctcctactgtgggtctcgggaaatagcccacttcttctgtgagttaccttccctactaatcctctcatgcaatgacacatcaatatttgaaaaggttattttcatttgctctatagtaatgcttgttttccctgttgcaatcatcattgcttcctatgctggagttattctggctgtcattcacatgggatctggagagggtcgtcgcaaagctttcacgacctgttcctctcacctcatggtggtgggaatgttctatggagcaggtttgttcatgtacatacagcccacatctgatcgctccccaacgcaggacaagctggtgtctgtattctacaccatcctcactcccatgctgaatcccctcatctacagcctccgcaacaaggaagtgaccagagcattcatgaagatctcaggaaagggcaagtctggagagagagttacctcataaactttatgttttgatgtctgctaaattattctcttctaatatccatcaagcttatcgataccgtcgacctcga

SEQ ID NO: 231 - DNA, 405 bp, Homo sapiens
  misc_feature (380): n equals a,t,g, or c
ttatttaggcgtacgggtgtgtttatagtgactagagtttamrasggggctgggtggcgggactsccgtgtacacactgtaactccatgtgtccagtttgtcctgctgacgcgttccacagctgtcaccggaaagctatctcctggggccagcagcatccaggaagggggtacctggggctgcagagacaagctcgtcggcagggcagggtgagggaccatgggtggaatggcagtggctgccagtgggctcggggctggcgcaggcatctcacgtcgcaccgtgatgcctgctgtrgctccagaagttcccaagccacgtggtgacagactgtgkgtggtggcaaagtgcacatgtcaccaagcaaggtctcgagcttncagtggtcccaccctctggggcagt

SEQ ID NO: 232 - DNA, 2949 bp, Homo sapiens
  misc_feature (17): n equals a,t,g, or c
  misc_feature (1217): n equals a,t,g, or c
ttttttttttttttttngkgattgattgattaatttattatttttaaaaacttggaaattcataaactaggataatcacattctccttccccatctctgggtagtgccatcattttaataagcaatgctcaaataacagaatggaacctttatcatggggatggcccttgtacaacaggagtacaaagggcttacaaagtgagtagactggctcaaactaacaatcacctttgctttgttttagcactttgcttacaagtgaatgggcttctagggctaagttattagttttcaattccttgtaatttgataccaaaacatatcaaaaataataagctaaaacaatattcaaacccatattttattggctttattacacacttcaatatttacaaagttaaagttaaatgaaaagtctctattgtattaaaaaaaataactacagcccaaattaaagtgccctggggcaaatacatatcaatcaactaagaatcagtgactgcatcaggaaccaggcagtactctgtgttacaacaaagcagtttatttgtgatcagtgtttgagactctatacatccttcacaaatttaattttacataatctgatacgtctcttaaaacttaaactttgaactgctagacttttatttccctagaacagaagggctggtataagttattttccagaaatgaggtaccgttttcacagaactggtttcttttttttttttcaagttttagagaactaaatttgcatttgttaaaatcaaaaagtaggaaagatgttctttacaaataattttgatcaagtatgtgttcaaagaaagcaggataaaaaggctttttctctaacattctgtgttgtactgtattgttgttcaataggaattagcttctgtcatttgctaaaagaatgagtagtggggaacaggatatgttggaaatttcataacgggtaacagaaccattctcttgggtaaaccataggcaggggcagctgtgctgtaaccatatggtgttccatagcctggagctatgtagccaggagcagctgtcgccccaacaaaagctccccttgttagagttcctcttcctctgccccgaacagcttggactgctgcagacacagctgtattcacaacgccctttgcctgagggataatcttctttttcttattatttgccgcattgggtccagaaaacagtttctccaaggnagctaaagctgcactcgcctttgccactttcttatttggacctgcgcctctgaatttctgtccatctacttctacctccattacaaagcgcttgtcatggcttccaccagtctctgagatgagttcatacttgagacctcttcttttttcattgagctccattacagggtttttgccacttgctgtgaggatagggccctgagttcttacctctaaggtactggaggtttcagttgtagaatttccagtattattgcttgagtttgaagacactgtttcatttttactttcattatctgatttttcatcggaactcatacattcaatatctgcatcaaagcctgttggatatcccattgcctgcaataccttcaccgctacgtgaagttttgctgttttcttggatggtcctgaggcttcatatgttgtgccatccacatctacagacattgtgaagactggggcatgaacggggccagactgagataggagcttatactgaagcccaggcctgatctgatttagcctcattagtgcattcataaggtctattgctttactatccagaattttccttaagtttcgtttcatcttcttgttggggtctttatcatcccctaatccatcttcaaatggcctctttagagctgaagacccagcaccttctttatcagtaactgaccaggaatacttctgaaaaggcttactagatggaagggggtccatctccagcactttgtaaatctgaccaaaggctgatagtctgagtgcatgctgtgcactgtgggtaatatcttctttttgctggatggtcatatagctcagagcatctgttgggtctcgctcacaaggatcatgaagaccaggacccccaggaagtagtattccagatgccaaacactccattactcgtctcaaggcctccccagcgcccaaaggtctattacaagtacctatagacttttcacatataagttctagtggccatcctttcaatggtgcccatgtggggactctgttgcacaaatcacgcagaatgcggaggacaattacacatgattttaatccatttgcccttgcctgaaaccatttggcatgtcgaagagacgccaaggcgttcaggcatttctgcctgtccaataagtccggaggatctttcatcgaaacattttctccatccttcttctccaattcgtccctaattagaggtgaggtaagtatcaccttcaaagttagcgtgggctcttttgtattccgaattataatagatgcctcatttacacattgttccacttgatatttctcttctgtgagtttctgaatcwgaataggaagattatctttgactgtatttaacagggtctctgtgggtttgtctttgcacattaaaaccagctccaagtccatatcatctttaatcagcaagccttttgcaaccaggccaatcctcattacaccacacaatgtccgaccaccttgatccttggaatagttttctccggcctcatctttcttcacttctgtctcaccctctgtttttgtgcctttatttgtttcatccaaccaatctgagacatgtttaagagcacattcaacagtagataccatattctgaacagcttcaagttcctccggaratggatarattgwtgaatgtttcctcgwrcygaattcctgcagsccgggggatccactagttctagagcggccgccaccgcggggagctcatatt

SEQ ID NO: 233 - DNA, 1165 bp, Homo sapiens
  misc_feature (2): n equals a,t,g, or c
  misc_feature (1053): n equals a,t,g, or c
  misc_feature (1080): n equals a,t,g, or c
  misc_feature (1081): n equals a,t,g, or c
  misc_feature (1109): n equals a,t,g, or c
  misc_feature (1131): n equals a,t,g, or c
  misc_feature (1143): n equals a,t,g, or c
tnagataatgttccttaggaagaaaataacattcttgggttgagggaaggaatgccatacactactgtctcttcagatctgaaatactccagtttagagccaggaaatttcacaggtcacaccgatttttagcattaaaaactaaggaatatacttagcacttacttaatcttttcagttttccagtttacgtctcaggaatgaagtgtagtctatggttgacaatggagttttgtgatcctgcttattgtaactgacaactgttttcaactccaagagctaaactattggcagttcatgttaagttagagtgagggtgtaggtagtgtcagtgagtggctcttgtgcctgctgtagacattaggcctgcactagggccatgtgctgtcaagattcaggaacatggctttaacaagcagatcttgtatcaaggcagaggtgatgccatgccatacttttaggaagtctgagatgataaatatttcaaggtcagtgaagtctatcaatcattctccccttcctcatcagcaatggtagatagaaatgtcctaaacttttctaaatcctagtgatgaggatgtgctgatattcaacatagtccttaaagtgaaaactgagttgttgctgacctccacaaaagaatatggaaaaaagccttgctgtacacctagttgtacagccactctggccaattccatttcctgtcctctgtggttctgactggagaccccagtgtgggggargtcttaccatttaatatagaaatgatatcaataactaatgctatgtacttggaaaatccaaataaggaagttttaggttggtgcataactttgtttctcaaattttcgttgtcagaacaaatggaaggagaatattatttagactaatccagatttgctttctatgaaaatctaatgtctggattatcttccttttctcatggcctaagaaataaggatcaataaggaatgatttgaatgtaattttgtgaatgtgtggaaaatataaagcagggatttaaccttaataaaggtaaccttcttgacatcnggtggtaatccccctttggactctttnnctggatctgcactctggtattttgaganggcatactggcactggattggnaaaattaaaagnaaaaattatttttcaaaaacaa

SEQ ID NO: 234 - DNA, 1120 bp, Homo sapiens
  misc_feature (1011): n equals a,t,g, or c
  misc_feature (1039): n equals a,t,g, or c
  misc_feature (1041): n equals a,t,g, or c
  misc_feature (1081): n equals a,t,g, or c
  misc_feature (1084): n equals a,t,g, or c
  misc_feature (1114): n equals a,t,g, or c
atataaactgtctacatttgttcaaataaaattatgtagaagaaaaaaaatcaatcaaatatgtacatgacacaaattactccttaaacataattgcttatgttaaattaaatgatgtcagtattattccagtgtttagctctgggtataggaaatgctgtagctaaagtcaccataaaaataaaatcaaggcattcacatttgaggttgtttgttacacatcacactatcctaaaggcttgaaaagactgcaaattaagtttccatgccaattatatacgttgaattttaaagctacagctatagagacagtacgaaaatcctattagcttaaatgtttcttttatgatttaccaagctgttgcattctcgtcataagaggcagaccttgttaggttaaaaacctatttctatatatttaatacctttttctctccaatattcttttcctaaaatgttcaaatgactttcaggtcttcctttccttttgatcttaaagtcaactgtcataatatttcccaaggacatatataattttattctaatgctaaacaagtgttttcaatgaccatttgytgatctattaaatattaatatacagtacagcagctatattcatcaacagaattccagtttattacctatatatacgtagcacagtcataggatactgkgctcatacataaaaatgcaaaaactgtcaaatgtgctatcctcccatgtatacaaaaaactattagcatcatgaggaagaaactttttaagtcaatacagattataatgaacacctgccattcataaaaatgtaacatacattctattatactatgctgatgagggaagggaagctaagtgagtaaatcagttgagacgacttaagaaaaaaattcaggaaatcataatttaaaaaagatcagcatattttgtatacctttaagtagattagagtgtgttgagtgtagagtctgatccacaaagtctgagcaaaaaaactggggcttctaatggaangttttggttttttaagaatcaaaggacntntaaatgaattcaagcctaaaaagtagcttcaacccaaagnggncccatttggttttaattttcctttttaggnaaagat

SEQ ID NO: 235 - DNA, 540 bp, Homo sapiens
  misc_feature (423): n equals a,t,g, or c
  misc_feature (454): n equals a,t,g, or c
  misc_feature (465): n equals a,t,g, or c
  misc_feature (521): n equals a,t,g, or c
ccatcttcctgtgtacctatagagccttcaccaccacccaacaggtcctggacctgctgttcaaaaggtacggtagatgtgacgccctcacggcctcctctagatacggctgcatcctcccctattccgacgaggatggtggaccccaggaccaacttaaaaatgccatctcctccatcctgggcacctggctggaccagtactcggaggatttctgtcaacctccggactttccctgcctcaagcagctggtggcctacgtgcagctcaacatgccaggctcagacctggagcgccgtgcccaccttctcctggcccagctggagcactcggaacccattgaggcagarcctgaggctctgtcaccagtgccagctctaaaaccaactccagagctcgagctaactctaacaccagctcgancacccagccagtgccggctccagccccgganccagaaccagntccaacacaacttcaagttcaaaactaaaattactccacaccgttccggaatcccncagggtccaaaacaattgt

SEQ ID NO: 236 - DNA, 647 bp, Homo sapiens
  misc_feature (570): n equals a,t,g, or c
  misc_feature (571): n equals a,t,g, or c
  misc_feature (613): n equals a,t,g, or c
  misc_feature (625): n equals a,t,g, or c
ggacatccggaactgtaagagcaaagaggcggaaattaagagaatcaacaaggaactggccaacatccgctccaagttcaaaggagacaaagccttgkatggctacagtaagaaaaaatatgtgtgtaaactgcttttcatcttcctgcttggccatgacattgactttgggcacatggaggctgtgaatctgttgagttccaataaatacacagagaagcaaataggttacctgttcatttctgtgctggtgaactcgaactcggagctgatccgcctcatcaacaacgccatcaagaatgacctggccagccgcaaccccaccttcatgtgcctggccctgcactgcatcgccaacgtgggcagccgggagatgggcgaggcctttgccgctgacatcccccgcatcctggtggccgkggacagcatggacagtgtcaagcagagtgcggccctgtgcctmcttcgactgtacaaggcctcgcctgacctggtgcccatkggcgagtggacggcgcgtgtkgtamacctgctcaatgaccagcacatgggtgtggtcacggccgccgnnagcctcatcacctgtctctgcaagaagaacccagatgacttnaagacgtgcgtntctctggctgtgtcgcgcctga

SEQ ID NO: 237 - DNA, 577 bp, Homo sapiens
  misc_feature (449): n equals a,t,g, or c
  misc_feature (568): n equals a,t,g, or c
  misc_feature (570): n equals a,t,g, or c
cagaatgggagtgaatgacttgtggcaaattttggagcctgttaagcaacacatccccttgcgtaatcttggtgggaaaaccattgcagttgatctgagtctctgggtgtgtgaggcacagacagtcaaaaaaatgatgggcagcgtcatgaagccccacctcaggaacttattttttcgtatctcatatttaacacaaatggatgtaaaactggtatttgttatggaaggggaaccaccaaagctgaaagctgatgtcataagcaagaggaatcagactcggtatgggtcttctggaaaatcgtggtctcagaaaacagggaratcacattttaaatcagtcttaagagagtgcctccatatgctcgaatgcttaggaatcccctgggttcaggctgctggggaagctgaagccatgtgtgcttatctcaatgctggtggtcatgtcnatggctgcctcaccaatgatggagatactttcctttatggggcccagactgtttacaggaatttcactatgaatacaaaggacccacatgttgactgttacacaatgtcatctatcaanantaaacta

SEQ ID NO: 238 - DNA, 904 bp, Homo sapiens
ccacatacaacagtattcggacatagaggactttcgacaagccacggcagcctcttccgtgatggtggcccgagcagccatgtggaacccatctatcttcctcaaggagggtctgcggcccctggaggaggtcatgcagaaatacatcagatacgcggtgcagtatgacaaccactacaccaacaccaagtactgcttgtsccagatgctacgagaacagctggagtcgccccagggaaggttgctccatgctgcccagtcttcccgggaaatttgtgaggcctttggccttggtgccttctatgaggagaccacacaggagctggatgcccagcaggccaggctctcagccaagacttcagagcagacaggggagccagctgaagatacctctggtgtcattaagatggctgtcaagtttgaccggagagcatacccagcccagatcacccctaagatgtgcctactagagtggtgccggagggagaagttggcacagcctgtgtatgaaacggttcaacgccctctagatcgcctgttctcctctattgtcaccgttgctgaacaaaagtatcagtctaccttgtgggacaagtccaagaaactggcggagcaggctgcagccatcgtctgtctgcggagccagggcctccctgagggtcggctgggtgaggagagcccttccttgcacaagcgaaagagggaggctcctgaccaagaccctgggggccccagagctcaggagctagcacaacctggggatctgtgcaagaagccctttgtggccttgggaagtggtgaagaaagccccctggaaggctggtgactactcttctgccttagtcaccccttcatgggcctggtgctaaagtggctgggatgcacagcatgaaccagatgcccg

SEQ ID NO: 239 - DNA, 1187 bp, Homo sapiens
tttttttttttttttttttttttttttttttttaaacttggctaagttgccctttattaacgaaaacatagagctttcggtcaattccaccacggagaacacaaaccagagataaaacccacaccaagggctatttcccaagctggggaatttgagaacacacgggcagagttcacgccacacaactacactgggctcgtccttgggaggcgttcacaggaagcaatcacgagcgccaagccacccacaaggcagtgcggcaaggctcccgggatccttacaggcatccaagcgaggtacagaaacctccacagcagtggggataaggggaaaatattttctcttgctaaagaatatccttagttctcaacataaacatgactacgtatatattcagcttcaaatgaaaaacaagtttacaaatcactactggatacttaaactctatgttgcttttctttttggcagcaccagcctaaactctgtgggtttgcaatatttcagaaacttcaggtacattacagtcttctgagaaaggcccagaacttcagaattccyggagcggccagaatgtttttggcttcttctgcatcctgcaaagggctctctccatattcttccttcagccactgccgatactgatggacctcatgcttctcaaactcctggagctgtctctggaagcccacgttggggttggcacaggatctcccagcacgcacggtgtgcagggcatcctcccagccaaagtcagtgacggtcatgatgtatgcgatcaccagtgtcacgctcctggagaccccggccaggcagtgtacaaggcagctctcaccgcggagccggcactcgtgaatgaatttaatactttctttgaaatgtcttgtcaggttttgagatggtgaatccgctgctgggatgcacaggtatttaactccctccaacataggcctggcactatcgtggacagacagaatatgtgtcaccttgttcttgctcaattgttccgcgtctctggcatctttgaagttgccgatgtacaggccgggcaggatcttgttcatcccattccccatggtggctgaaggcgaacgctagcgccccggccgtgtggtcgcaggcgcactatggcatgttacagggaggaggagcggcggggcgggcgggcggacgtcgtgggtcgaccggga

SEQ ID NO: 240 - DNA, 3714 bp, Homo sapiens
  misc_feature (3450): n equals a,t,g, or c
  misc_feature (3466): n equals a,t,g, or c
  misc_feature (3488): n equals a,t,g, or c
  misc_feature (3501): n equals a,t,g, or c
  misc_feature (3542): n equals a,t,g, or c
  misc_feature (3579): n equals a,t,g, or c
  misc_feature (3713): n equals a,t,g, or c
gtcctcatacaacccggagtaggcgagaccaagaagtagccggtagagattaccactttgtttcgcggcaagcattcgaggcagacatagcagctggaaagttcattgagcatggtgaatttgagaagaatttgtatggaactagcatagattctgtacggcaagtgatcaactctggcaaaatatgtcttttaagtcttcgtacacagtcattgaagactctccggaattcagatttgaaaccatatattatcttcattgcacccccttcacaagaaagacttcgggcattattggccaaagaaggcaagaatccaaagcctgaagagttgagagaaatcattgagaagacaagagagatggagcagaacaatggccactactttgatacggcaattgtgaattccgatcttgataaagcctatcaggaattgcttaggttaattaacaaacttgatactgaacctcagtgggtaccatccacttggctgaggtgaaagaaacatccattctgtggcatgttggacttgatctggcaaaaactgscaataggaggactgcccgacactgcagcaagattgaggataagatggaaggcagcagtataagctgtagatctgktccttagatctcttgaattagtgagacgacagttcccttaggcagtttgtgcatggcatcctttattctctatacatggctttagcggttctkgcctcattttgggattctaaatggaagctttcaacagagcattccattttgtcctgttaaaaccttttgttttcacctaaaccctttctgcttagttgtatctctgtgaaaaacttgtatacacaagcgtccatgtctcacacaaatattgatgtgattattcttaagtgttaaatcattaacacttaaatgacttcattgggaatattgagcagagggactgtgcttctatgcactgggcaaggcagtatttgcttaggaaactaatttagtcatcagagatactttcctaaaaaggaaaaataaaaaacaaaatggtgccactttgggttgaagctactttgttaggcttgaattcatttatatgtcttttgattcttaaaaaaacaaraaacattccattagaagcaccagtttttttgctcagactttgtggatcagactctacactcaacacactctaatctacttaaaggtatacaaaatatgctgatcttttttaaattatgatttcctgaatttttttcttaagtcgtctcaactgatttactcacttagcttcccttccctcatcagcatagtataatagaatgtatgttacatttttatgaatggcaggtgttcattataatctgtattgacttaaaaagtttcttcctcatgatgctaatagttttttgtatacatgggaggatagcacatttgacagtttttgcatttttatgtatgagcacagtatcctatgactgtgctacgtatatataggtaataaactggaattctgttgatgaatatagctgctgtactgtatattaatatttaatagatcaacaaatggtcattgaaaacacttgtttagcattagaataaaattatatatgtccttgggaaatattatgacagttgactttaagatcaaaaggaarggaagacctgaaagtcatttgaacattttaggaaaagaatattggagagaaaaaggtattaaatatatagaaataggtttttaacctaacaaggtctgcctcttatgacgagaatgcaacagcttggtaaatcataaaagaaacatttaagctaataggattttcgtactgtctctatagctgtagctttaaaattcaacgtatataattggcatggaaacttaatttgcagtcttttcaagcctttaggatagtgtgatgtgtaacaaacaacctcaaatgtgaatgccttgattttatttttatggtgactttagctacagcatttcctatacccagagctaaacactggaataatactgacatcatttaatttaacataagcaattatgtttaaggagtaatttgtgtcatgtacatatttgattgattttttttcttctacataattttatttgaacaaatgtagacagtttatatgtcgcctttttctgttcaaatttgcatggcctattaagttggctggagagtgttttatgtggaaatattttcaagataatgttccttaggaagaaaataacattcttgggttgagggaaggaatgccatacactactgtctcttcagatctgaaatactccagtttagagccaggaaatttcacaggtcacaccgatttttagcattaaaaactaaggaatatacttagcacttacttaatcttttcagttttccagtttacgtctcaggaatgaagtgtagtctatggttgacaatggagttttgtgatcctgcttattgtaactgacaactgttttcaactccaagagctaaactattggcagttcatgttaagttagagtgagggtgtaggtagtgtcagtgagtggctcttgtgcctgctgtagacattaggcctgcactagggccatgtgctgtcaagattcaggaacatggctttaacaagcagatcttgtatcaaggcagaggtgatgccatgccatacttttaggaagtctgagatgataaatatttcaaggtcagtgaagtctatcaatcattctccccttcctcatcagcaatggtagatagaaatgtcctaaacttttctaaatcctagtgatgaggatgtgctgatattcaacatagtccttaaagtgaaaactgagttgttgctgacctccacaaaagaatatggaaaaaagccttgctgtacacctagttgtacagccactctggccaattccatttcctgtccctctgtggttctgactggagaccccagtgtgggggaggtcttaccatttaatatagaaatgatatcaataactaatgctatgtacttggaaaatccaaataaggaagttttaggttggtgcataactttgtttctcaaattttcgttgtcagaacaaatggaaggagaatattatttagactaatccagatttgctttctatgaaaatctaatgtctggattatcttccttttctcatggcctaagaaataaggatcaataaggaatgatttgaatgtaattttgtgaatgtgtggaaaatataaagcagggatttagccttaataaaggtaaccttctgacatctgttgttaatccccctttgtactcttttcctgtatctgcactgttattttgagatgtcatactgtacactgtattgtaaaaataaaaagtaaaattatatttcaaattttaaaaaaaaaaaaaaaaaaaaaaaaaaaaaaaaaactcgagggggggcccggtacccaattcgccctatagtgagtcgtattacaattcactggccgncgttttacaacgtcgngactgggaaaaccctggcgttncccaacttaatcnccttgcagcacatccccctttcgccagctggcgtaatagcnaaaaggcccgcaccgatcgcccttcccaacagttgcncagcctgaatggcgaatggcaaattgtaagccgttaatattttggtaaaattcgcgttaaatttttggtaaatcagctcattttttaaccaataggccgaaatcggcaaaatcccttttaaatcaaaagaattng

SEQ ID NO: 241 - DNA, 618 bp, Homo sapiens
  misc_feature (535): n equals a,t,g, or c
  misc_feature (613): n equals a,t,g, or c
gaaccgcatctgtgtgctggacgtggacctgcagggtgtgcggaacatcaaggccaccgatctgcggcccatctacatctctgtgcagccgccttcactgcacgtgctggtgtgtgctgggcagggttgggggctgggggccagggcatgccaggctctgattgccaccccctttttaggagcagcggctgcggcaggcaacactgaaaccgaggagagcctggtgaagcggctggctgctgcccaggccgacatggagagcagtgagtgtgccgtgggatcaccagggaatgccaggaggggagtcagggttctraggtctgtggcaccagggaccctgtgggtcccagaaccttcctgacamctggagtccctgtgaagggtcctcagacctytcaaytacctcccaacacctagagtccccgtgaaggttccccagaacccacccccagttcaccaagggtcttcattgagggtcctcagatttccctctgttacccagagtctccgtgagggcccccagaccccccatcgnccagggttcccatggagatgttccccaactttttaggccccgggggtgttcatgttgcatccttttaacagttgttgnctttt

SEQ ID NO: 242 - DNA, 366 bp, Homo sapiens
  misc_feature (82): n equals a,t,g, or c
atccgccgcaccgctgggggccaacgttgtcggaccgaggagtccgaggtggcgactgagtgagatacccagctgtgcggantaggacgcggaacatcccagaggccagcatcaacatgtttccatccttggggaatgaccacgcaactgggcccagccctggtgctgggggtggccctgtgcctgggttgtggccagcccctaccacaggtccctgaacgccccttctctgtgctgtggaatgtaccctcagcacactgtgaggcccgctttggtgtgcacctgccactcaatgctctgggatcatagccaaccgtggccagcattttcacggtcagaacatgaccattttctacaagaacaact

SEQ ID NO: 243 - DNA, 703 bp, Homo sapiens
cagggatggcaagatcttttagcatttaggggatgcctttgttagtaaccgttcacaatgggcagctcccggctgagggtctttgaccctcatttggagaggaaagattccgccgcggcgctctcagaccgagagctgcccttgcctaccttcgatgtgccttatttcaaatacatcgacgaggaggatgaggacgatgaatggagcagccgctcgcagtcttccaccgaggatgactcagtggactctctgctctctgacagatatgtggtggtgtccgggaccccggagaagattttggagcaccttttgaatgacttgcacctggaagaagtccaggacaaagaaacagagaccctcctggatgacttccttctmacgtacactgtcttcatgacaactgatgacttgtgccaggctctgttaaggcactattctgctaagaagtatcaaggcaaagaggaaaactcagaygttccgsgtaggaaacgtaaagtcttgcatcttgtttcccagtggattgctctgtacaaagactggttacctgaagatgaacattcaaaaatgtttttaaagaccatatataggaatgtactggatgatgtttatgaatatccaatacttgaaaaagaattgaaagaatttcaaaagatacttggaatgcaccgtcgtcacactgtagatgaatattcaccacaaaaaa

SEQ ID NO: 244 - DNA, 352 bp, Homo sapiens
  misc_feature (132): n equals a,t,g, or c
ggcacgagctgggagctaggtcctcggagtgggccrgagatggcggcggccgacggggctttgccggagggcggctttagagcaacccgyggactgcctgcctcggtgcgggcgagtatcgagcggaagcgncagcgggcactgatgctgcgccaggcccggctggctgcccggccctactcggcgacggcggctgcggctactggaggcatggctaatgtaaaagcagccccaaagataattgacacaggaggaggcttcattttagaagaggaagaagaagaagaacagaaaattggaaaattgttcatcaaccaggacctgttatggaatttgattatgtaatatgcga

SEQ ID NO: 245 - DNA, 873 bp, Homo sapiens
  misc_feature (1): n equals a,t,g, or c
  misc_feature (84): n equals a,t,g, or c
ncctgcatggccggcccgggtggggggcgcgggggggcccgggcgccatgcggggggggcacaaagggggtcgctgtgcctgtncccgtgtgatccgaaaagtgctggcaaaatgcggctgctgcttcgcccgggggggacgtgaatcctattccattgcgggcagtgaggggagtatatcggcttctgctgcctccggtctggctgccccctctggccccagctctggcctcarctctggcccctgttccccaggccccccagggccgtcagtggcctgaggagatggttggatcattccaaacattgtctcagtgtggaaatgaggcagacagtggtcaggcaggaccatatgagaactggatgttggagccagctctagccacaggagaggagctgccggaactgaccttgctgaccacactgttggarggccctggagataagacgcagccacytgaagaggagactttgtcccaagcccctgagagtgaggaggaacagaagaagaaggctctggaaaggagtatgtatgtcctgagtgaactggtagaaacagagacaatgkacgtggacgacttggggcacattgtggagggttatatggccaccatggctgctcagggggtccccgagagtcttcgaggccgtgacaggattgtgtttgggaatatcccgcaaatctatgagtggcaccgagactatttcttgcaagagctacaacggtgtctgacagatcctgattggctggctcagctattcatcaaacacgagcgccggctgcatatgtatgtggtgtactgccactggataaacaggcccttggtgacatcccccaggctccccatgactctcctccagtctctccaactc

SEQ ID NO: 246 - DNA, 849 bp, Homo sapiens
  misc_feature (298): n equals a,t,g, or c
gctctggagggccagagctgcgactatgccagcaagagctatgatgccgttgtcttcgatgtcttgaaagtgaccccagaggagtttgctagccagattacattaatggatatacctgtgtttaaagctatccagccggaggagtgaagcatggaggtggggacagacttcaagcgatggagatataaacaacctaggaactagccagctgtggatggagtaagaaggagaaacacagtcttgcccctaacgttgtggcctttacccggaggtttaaccaggtcagtttttgggttgnaccgagaaattctaacagcacagactttaaaaataagggcagaaatcctcagccattttgtgaaaatagccaagaaacttctagaactcaacaaccttcattctctcatgtctgtggtatcagcattacaaagtgctcccatcttcaggctgacaaaaacctgggctcttttaaatcgaaaagacaagactacctttgagaaattggactacctgatgtcgaaagaagataattacaagcggacacgggaatatatccgaagcctgaagatggttccaagtattccctatctaggaatccagctgctctgtgtttggcagtcgtgtgaagaggcccgtgtggcacgggattgagacctgccaacaaccatgtgagggagtttggaagaagattctgctaaaaaggcgagccttcagatgagactgcagccccagccaatagcttgactgaagtctcatcacagaccttaaaccagagacacccagctaagacatgcccaaattcccaatccacagaaactgcaagacaataaatgtttattgtaagaaaaa

SEQ ID NO: 247 - DNA, 719 bp, Homo sapiens
  misc_feature (621): n equals a,t,g, or c
  misc_feature (626): n equals a,t,g, or c
  misc_feature (643): n equals a,t,g, or c
  misc_feature (658): n equals a,t,g, or c
  misc_feature (712): n equals a,t,g, or c
aagaagagcccgaccaggccaaaaagacaagcgaaacctgccgcagacgaagggttttgggattgtagcgtctgcaccttcagaaacagtgctgaagcctttaaatgcagcatctgcgatktgaggaaaggcacctccaccagaaaacctcggatcaattctcagctggtggcacaacaagtggcacaacagtatgccaccccaccaccccctaaaaaggagaagaaggagaaagttgaaaagcaggacaaagagaaacctgagaaagacaaggaaattagtcctagtgttaccaagaaaaataccaacaagaaaaccaaaccaaagtctgacattctgaaaatcctcctagtgaagcaaacagcatacagtctgcaaatgctacaacaaagaccagcgaaacaawtcacacctcaaggccccggctgaaaaacgtgggacaggagcactgcacagcgtttgggcagttaactgtggggcaacgttcaccgttcattattcacaggacttttaagggaaaaggattcggttccttcttcggacatccttcttcccacagtggaccttcccgttgcaggggttcaggaacaggcaggaaccaggggccggttcgggggttcnggagnggcaccggacaggggtntccttcccctttccntccacggccaagggggcactttttcgggcgttccttgttggtttttttttttgnattttgc

SEQ ID NO: 248 - DNA, 909 bp, Homo sapiens
  misc_feature (857): n equals a,t,g, or c
  misc_feature (897): n equals a,t,g, or c
  misc_feature (903): n equals a,t,g, or c
gcccaaaatgggccgcaggagcattgagtcccccagtttggggttctgcacagataccctccttccccacctcctagaggatgatctgggccagctgtctgacctggagccagagccagatgcccaaaattggcagcatacagtgggcaaggatgtggtggctgggctaacccagcgggagattgaccggcaagaggtcatcaatgagctgtttgtgactgaagcttcccacctgcgcacactccgggtcctggacctgatcttctaccagcgaatgaagaaggaraacctgatgccccgggaggagctggcccggctcttcccgaacctgcctgaactcatagagattcacaattcctggtgtgaagccatgaagaagctccgggagaaggccccatcatcaaagagatcagtgacctcatgctggcccggtttgatggccctgcccgagaggaactccagcaagtggctgcacagttctgttcctatcagtcaatagccctagagctaatcaagaccaagcaacgcaaggagagtcgattccagctcttcatgcaggaggctgagagccaccctcagtgtcggcggctgcagctgagagacctcatcatctctgagatgcagcggctcaccaagtacccgctgctgctggagagcatcatcaagcacacagagggtggcacctctgagcatgagaagctgtgccgggcccgggaccagtgccgggagattytcaagtatgtgaatgaagcggtaaaacaaacagagaaccgccaccgtttaagarggytaccagaaacgcytggatgccaccgcctggagagggccagcaamcccctggsagcagattcaagagntggatcttacaaccagaaaatgatccatgaaggaccctgnactggnagttca

SEQ ID NO: 249 - DNA, 426 bp, Homo sapiens
  misc_feature (360): n equals a,t,g, or c
  misc_feature (422): n equals a,t,g, or c
  misc_feature (423): n equals a,t,g, or c
acccacgcgtccgagagtccccaatagcaatccccctgaatatgagttcttctggggcctgcgctcttactatgagaccagcaagatgaaagtcctcaagtttgcctgcaagctccagtcatcccaagagcctgaagcaccaccacctcgggatgtggcccttttgcaagggagggcaaatgatttggtgaagtaccttttggctaaagaccagacgaagattcccatcaagcgctcggacatgctgaaggacatcatcaaagaatacactgatgtgtaccccgaaatcattgaacgagcaggctattctttggagaaggtatttggggattcattgaaggaaattgataagatgaccantgtacattcttctcagcacttagagcccatgatgcaggcatgggaagattaggatcaccagnnggt

SEQ ID NO: 250 - DNA, 445 bp, Homo sapiens
  misc_feature (425): n equals a,t,g, or c
  misc_feature (432): n equals a,t,g, or c
  misc_feature (440): n equals a,t,g, or c
taaccagtgccctgttgatgggcagttcatctgttttgaatgttttctattgtttccaagggatggcagcaaaattcagaaggcttagactaccactgtcctccacaaggtgctccagcagattgtcaccttattcaacacaagaggttggttggaatgaaactggcctggagaaattattcactgaatttttatcagcattgggaagtcctggagccctgcttgttgaatgagttaggggtggaagggctctctcaggccatgacaactccctaatgctgtgaagagctacttccaaggaatcagtctctatctggaaaagaaagaagagagcctctgtacatgggaagttggagcaagaaatcatgagatccttctttttttcatcaaacttgcaagtaaggtttattagcttaggaccagantgtgtcntcaggaanggtta

SEQ ID NO: 251 - DNA, 411 bp, Homo sapiens
  misc_feature (391): n equals a,t,g, or c
  misc_feature (410): n equals a,t,g, or c
ggggccagccctaggcctccaaacaatggggcattcctcaactccgagcccctgggygwcagcaagatgagcgccttgccagcccaatccattcaacctacatcccaattcccacttcagcaatttgtgccacaggatctaatggctctgccccaacacgaatctcagtacaatgcttgtcccctgccaccacaggctcagcatcagtagatctctgttgtaccagagatatttctctgttacctggagagccacctattgctgttcccacaggtgtttttggccccttgccgactggagtgtcggtttgctatttgatctctcaagcctaaatttaaaaggtgttcaagtacatactggtgtaattgattctgatattcaggtgaaattnatattgtcattagctctgna

SEQ ID NO: 252 - DNA, 644 bp, Homo sapiens
  misc_feature (622): n equals a,t,g, or c
cctctttgcacaatggtggaaccattaagacgttgtcccaagcccttgggacaggcagggtgatggacacttgcaatctgacgccttgaccgtcgagctccgcttttctattgcaggaatcccagcctaaactgcgcatcctgctcgttggttgcacaaggagccgaagtgcgtcccttgcccgggaaggacgcctggccggacgcgcgggtcccgccggggttcccgccttagctccggccggagcatcagaatgcagagccagagccccggagcctctccctgggcggccatgtgggtttcgacagcctccccgaccagctggtcagcaagtcggtcactcagggcttcagcttcaacatcctctgtgtgggggagaccggcattggcaaatccacactgatgaacacactcttcaacacgaccttcgagaytgaggaagccagtcaccatgaggcatgcgtgcgcctgcggccccagacctatgacctccaggagagcaacgtgcagctcaagctgaccattgtggatgccgtgggytttggggatcagwtcaataaggatgagagttacaggcccwtagttgaytacatcgatgcgcatttgaaattattttgcaggnggagttgaagatccgccgttcg

SEQ ID NO: 253 - DNA, 1217 bp, Homo sapiens
  misc_feature (6): n equals a,t,g, or c
  misc_feature (1162): n equals a,t,g, or c
  misc_feature (1188): n equals a,t,g, or c
  misc_feature (1206): n equals a,t,g, or c
gagatngactatgccaccaatactcaggatgaagaggaaacaaagaaagaggaatctcttaaatctcccttgaagccagagtcacagctagatcttcgggtacaggagttaataaagttgatctgtaatgttcaggccatggaagaaatgatgatggaaatgaagtataataccaagaaagccccacttgggaagctgacagtggcacaaatcaaggcaggttaccagtctcttaagaagattgaggattgtattcgggctggccagcatggacragctctcatggaagcatgcaatgaattctacaccaggattccgcatgactttggactccgtactcctccactaatccggacacagaaggaactgkcagaaaaaatacaattactagaggctttgggagacattgaaattgctattaagctggtgaaaacagagctacaaagcccagaacacccattggaccaacactatagaaacctacattgtgccttgcgcccccttgaccatgaaagttaygagttcaaagtgatttcccagtacctacaatctacccatgctcccacacacagcgactataccatgaccttgctggatttgtttgaagtggagaaggatggtgagaaagaagccttcagagaggaccttcataacaggatgcttctatggcatggttccaggatgagtaactgggtgggaatcttgagccatgggcttcgaattgccccacctgaagctyccatcacaggktacatgkttgggaaaggaatctactttgctgacatgtcttccaagagtgccaattactgctttgcctctcgcctaaagaatacaggactgctgctcttatcagaggtgagacaggagtatgtctgtgatctctagtttattaattccagtttttttccgatgagaaaagtttgaccccagaaccaagaggtttacctgggatagcttgagagaggaccaagtacaatttctagtacattggattcctctgctggagtaggggaaaaaagtactgatgggattttctgtttggctttggagccatctaattcttagtaggatatgggaattcaaaggtttttgctttgcaggtagctctaggtcatgtaatgaactactagaggccatcccaaggccgaagattgcttcaagnaaacatagcaccaaaggggtggggcnagatgggtcccattctgnccatttcgtca

SEQ ID NO: 254 - DNA, 818 bp, Homo sapiens
  misc_feature (21): n equals a,t,g, or c
cgctctagcaactagtgggtnccccgggctgcagaattcgggcacgagtccttgcgcccccttgaccatgaaagttatgagttcaaagtgatttcccagtacctacaatctacccatgctcccacacacagcgactataccatgaccttgctggatttgtttgaagtggagaaggatggtgagaaagaagccttcagagaggaccttcataacaggatgcttctatggcatggttccaggatgagtaactgggtgggaatcttgagccatgggcttcgaattgccccacctgaagctcccatcacaggttacatgtttgggaaaggaatctactttgctgacatgtcttccaagagtgccaattactgctttgcctctcgcctaaagaatacaggactgctgctcttatcagaggtagctctaggtcagtgtaatgaactactagaggccaatcctaaggccgaaggattgcttcaaggtaaacatagcaccaaggggctgggcaagatggctcccagttctgcccacttcgtcaccctgaatgggagtacagtgccattaggaccagcaagtgacacaggaattctgaatccagatggttataccctcaactacaatgaatatattgtatataaccccaaccaggtccgtatgcggtaccttttaaaggttcagtttaatttccttcagctgtggtgaatgttgatattaaataaaccagagatctgatcttcaagcaagaaaataagcagtgttgtacttgtgaattttgtgatattttatgtaataaaaactgtacaggtctaaaaaaaaaaaaa

SEQ ID NO: 255 - DNA, 1183 bp, Homo sapiens
  misc_feature (927): n equals a,t,g, or c
  misc_feature (997): n equals a,t,g, or c
  misc_feature (1052): n equals a,t,g, or c
  misc_feature (1104): n equals a,t,g, or c
  misc_feature (1160): n equals a,t,g, or c
  misc_feature (1167): n equals a,t,g, or c
gtgggactcgcctctccatccccatcacttccaacacattgatctattatcacccccaccccgaagatattaagttccacttgtaccttgtccccagcgacgccttgctaacaaaggcgatagatgatgaggaagatcgcttccatggtgtgcgcctgcagacttcgcccccaatggaacccctgaactttggttccagttatattgtgtctaattctgctaacctgaaagtaatgcccaaggagttgaaattgtcctacaggagccctggagaaattcagcacttctcaaaattctatgctgggcagatgaaggaacccattcaacttgagattactgaaaaaagacatgggactttggtgtgggatactgaggtgaagccagtggatctccagcttgtagctgcatcagcccctcctcctttctcaggtgcagcctttgtgaaggagaaccaccggcaactccaagccaggatgggggacctgaaaggggtgctcgatgatctccaagacaatgaggttcttactgagaatgagaaggagctggtggagcaggaaaagacacggcagagcaagaatgaggccttgctgagcatggtggagaagaaaggggacctggccctggacgtgctcttcagaagcattagtgaaagggacccttacctcgtgtcctatcttagacagcagaatttgtaaaatgagtcagttaggtagtctggaagagagaatccagcgttctcattggaaatggataaacagaaatgtgatcattgatttcagtgttcaagacagaagaagactgggtaacatctatcacacaggctttyaggacagacttgtaacctggcatgtacctattgactgkatcctcatgcattttcctcaagaatgtctgaagaaggtagtaatattccttttaaattttttncaaccattgcttgatatatcactattttatccattgacatgattcttgaagacccaggataaaggacatncggataggtgtgttatgaaggatggggcctggaaagcaacttttctgattaatgngaaaaatattcctatggcactccgttgaagtatcccttttatactaaagccnaaaactacaaaacttttactgaggcctcaggatctgatgcagcttttttttgtgtngcttacntttttgtcggttaaca

SEQ ID NO: 256 - DNA, 810 bp, Homo sapiens
  misc_feature (12): n equals a,t,g, or c
  misc_feature (43): n equals a,t,g, or c
ggtgagtctgcngctcggcgacttggtgtgggggaaactcggncgatatcctccttggccaggaaagattgttaatccaccaaaggacttgaagaaacctcgcggaaagaaatgcttctttgtgaaattttttggaacagaagatcatgcctggatcaaagtggaacagctgaagccatatcatgctcataaagaggaaatgataaaaattaacaagggtaaacgattccagcaagcggtagatgctgtcgaagagttcctcaggagagccaaagggaaagaccagacgtcatcccacaattcttctgatgacaagaatcgacgtaattccagtgaggagagaagtaggccaaactcaggtgatgagaagcgcaaacttagcctgtctgaagggaaggtgaagaagaacatgggagaaggaaagaagagggtgtcttcaggctcttcagagagaggctccaaatcccctctgaaaagagcccaagagcaaagtycccggaagcggggtcggcccccaaaggatgagaaggatctcaccatcccggagtctagtaccgtgaaggggatgatggccggaccgatggccgcgtttaaatggcagccaaccgcaagcgagcctgttaaagatgcagatcctcatttccatcatttcctgctaagccaaacagagaagccagctgtctgttaccaggcaatcacgaagaagttgaaaatatgtgaagaggaaactggctccacctccatccaggcagctgacagcacagccgtgaatggcagcatcacacccacagacaaaaagataggattttt

SEQ ID NO: 257 - DNA, 1316 bp, Homo sapiens; identical to SEQ ID NO: 134

SEQ ID NO: 258 - DNA, 450 bp, Homo sapiens; identical to SEQ ID NO: 135
  misc_feature (400): n equals a,t,g, or c
  misc_feature (420): n equals a,t,g, or c
  misc_feature (424): n equals a,t,g, or c
  misc_feature (443): n equals a,t,g, or c

SEQ ID NO: 259 - DNA, 492 bp, Homo sapiens
  misc_feature (425): n equals a,t,g, or c
agttctgcaccaaatgcagttgccttcaccagaagattcaatcatgtaagcttttgggttgttagagagattcttcatgctcaaacattaaaaattagagcagaagttttgagccactatattaaaactgctaagaaactgtatgagctgaataaccttcatgcacttatggcagtggtttctggcctacagagtgccccaattttcaggttgactaaaacatgggcgttattaagtcgaaaagacaaaactacctttgaaaaattagaatatgtaatgagtaaagaagataactacaaaagactcagagactatataagtagcttaaagatgacaccttgcattccctatttaggtatctatttgtcagatttaacatacatcgrttcagcatacccatcaactggcagcattctagaaaatgngcaaagrtccaaatttaaatgggttaatatccttcgaataatttctgattttacagcagttcttgtg

SEQ ID NO: 260 - DNA, 610 bp, Homo sapiens
  misc_feature (24): n equals a,t,g, or c
  misc_feature (45): n equals a,t,g, or c
  misc_feature (61): n equals a,t,g, or c
  misc_feature (596): n equals a,t,g, or c
  misc_feature (608): n equals a,t,g, or c
aatgcattgtgccttgtggttgtncaccctgtggctgttctggtngaattggccctcttcntcctaaacaaggagtaaagtctgatgactctataagcaagattatatacactggcgccaaattactaatcttttccatatgtgaacagatgggcttcccaacacgatctccttcagcctggaagaggaagaggaactggagggtggagagtcagcagaaatccacgtgcttctcagaagatctcgtggcagagcagctgacctacatggatgcacaactcttcaagaaagtagtgcctcaccactgcctgggctgcatttggtctcgaagggataagaaggaaaacaaacatttggctcctacgatccgtgccaccatctctcagtttaataccctcaccaaatgtgttgtcagcaccatcctggggggcaaagaactcaaaactcagcagagagccaaaatcattgagaagtggatcaacatcgctcatgaatgtagactcctgaagaatttttcctccttgagggccatcgtttcggcactgcagtctaawtccatctatcggttaaaaaagacttgggstgccgttcccaanggaccgaatgcnga

SEQ ID NO: 261 - DNA, 1489 bp, Homo sapiens
aaacaggggaggttgtgtgtgggggtgggaatggccaccatggctgctcagggggtccccgagagtcttcgaggccgtgacaggattgtgtttgggaatatcctgcaaatctatgagtggcaccgagactatttcttgcaagagctacaacggtgtctgaaagatcctgattggctggctcagctattcaycaaacacgagctccggcagcagctggggcaccgcctgcagctgaacgacctcctcatcaaacctgtgcagcggatcatgaaataccagctgctgctcaaggwttttctcaagtattacaatagagctgggatggatactgcagacctagagcaagctgtggaggtcatgtsctttgtgcccaagcgctgcaacgatatgatgacgctggggagattgcggggatttragggcaaactgactgctcaggggaagctcttgggccaggacactttctgggtcaccgagcctgaggctggagggctgctgtcttcccgaggtcgagagaggcgcgtcttcctctttgagcaaatcatcatcttcagtgaagccctgggaggaggagtgagaggtggaacacagcctggatatgtatacaagaacagcattaaggtgagctgcctgggactggaggggaacctccaaggtgacccttgccgctttgcactgacctccagagggccagagggtgggatccagcgctatgtcctgcaggctgcagaccctgctatcagtcaggcctggatcaagcatgtggctcagatcttggagagccaacgggacttcctcaacgcattgcagtcacccattgagtaccagagacgggagagccagaccaacagcctggggcggccaagagggcctggagtggggagccctggaagaattcrgcttggagatcaggcccagggcagcacacacacacccatcamtggctctctcccctctctgctgctgtcacccaaaggggaggtggccagagccctcttgccactggataaacaggcccttggtgacatcccccaggctccccatgactctcctccagtctctccaactccaaaaacccctccctgccaagccagacttgccaagctggatgaagatgagctgtaactggtgaaaaccatgggggtggtgctgactcagccgcctattccccaaggagcttcagggcagtccttctggcactgctccagaattcctccttcttggtgtgtctggagggtgggcaaggctgggagggatatcaacttggaggagaacacctagacccaaggacttttttctgcccaaggaacacagtttccttcagctcccatccctatgcatgcatcatggtccccccaaaaggaggatatgtgggtgggtgggagggctggggcaggggccagatagaaattattggttttgttttttaattttgtttttcctgttttctgagaataaaggttttgttatatcaccacacaccacrrgr

SEQ ID NO: 262 - DNA, 1691 bp, Homo sapiens
  misc_feature (1421): n equals a,t,g, or c
tttttttttttttttttttttctttttcatgatctttatttatcctcgagacgcttggatccagtaagcgagtgacaatttcaagactgccagccatgcacctctgtatgtttttggcccaagcagcagccgtgggcctagtgccaaccctcacacgctagctacctcctcctgtgcttggagtggaaagtctgtggggttctctgtctggttctgcaagcttttcacaccatctcttcgctgtctgtctctatgctaggggtttcacacaactctacaccattgcattcatgcttgccgtatccctgactttctgcacaagtgcagggcagagatggcccttttgttttggtgagggagagagggaaacacttgggcacaaagaggggaagggactgtgaatcccagggagcaccctggccagatcccagcggtgttcgaatcccaggaccatcttccatctacagcctagctgcctccttccctggtcaacccttcctgggtgcccatccaccacactgcccaacctcactccccgtcccctcccacaaagagtgacagtggcctggggctcggcctctcctgaccccaggggaggatgggtgatctgggcctcctgctacctgccacctgggcctcctatctccagctgggagccagggacctacccacgggcctggcctgacctctctccccctcccctcatgcttccagaccctgccgcagcctgcggtccagggccaggagctgcctcaggaagccccggttggggatgatgcctcggtggtctttgactttcttgatggcctccacgagggtaaggtggtggtacagcatgaggtaggccartaccagggtggcggatcggctcacgcccacagcacaatgcaccaggatcttccctcctggctggctcagcgcccggtggatgaartcggcagccgtctggaagtggatgctcatgtcaaaggctggcgagtcgtgggcctcaacacccaggtagcggatgcccagcccctcataggcctcgggcgtgcctcgccaccggctgtgtgaggcattgaggacgtgcgtgatgcccaggcggcgaagctcccggcggttgttagccatgtcctggtctccgagatagaggcctggccagacctcgtcggcatggttacaggctgtcttgcctgtgtagaggagccgctccaactcgaagacattgaggaaaggatgttgaacggttggcatctcctccagggtccctcgagttcgaacaggagaccttgagctactccgggagaagcgggccataaaagtcatagaagcccaaagccagttaccagggcacatcttagaggtggcagaaaccgtggcagctgcaggagtggctgtggtgatgatgggttcagttgccaggtagctgctctttgcanagctgcgctgggcctcagtccgaaagcggatcgccgcagacagcccacggccatgacgctcctgytgtgcgccgctttttgcccaagacaggttacagatagcgtatttaagcatgacacacacgtcgaagcaggttaaatcagcgtgtgcgctggtgacataaagggactcggtcttacattcggtggcccgagtcgccaggcagcgtgggctccccagccaaccccccacgagcccgcgcgccttgcagaccagacacggccccgccg

SEQ ID NO: 263 - DNA, 1140 bp, Homo sapiens
  misc_feature (1104): n equals a,t,g, or c
gcgcctgaaggagagagctttgtttaagactgagaaagtgagggtccgagagtctaatgaatgctctgggcacccaggccgcacctgaggagcaccgacgactgcacggtctgcggcgcgggaagcagatctgcggctgaacctctaccccaattacttagcggcgactgagcctatcgagcagttttccatggacacagcctagcagaaagacgcagccttcgtgcttcgctgactgctgaccactgacccaccgccttgatgacagcaccctcgtgtgccttcccagttcagttccggcagccctcagtcagcggcctctcgcagataaccaaaagcctgtatatcagcaatggtgtggccgccaacaacaagctcatgctgtctagcaaccagatcaccatggtcatcaatgtctcagtggaggtagtgaacaccttgtatgaggatatccagtacatgcaggtacctgtggctgactcccctaactcacgtctctgtgacttctttgaccctattgctgaccatatccacagcgtggagatgaagcagggccgtactttgctgcactgtgctgctggtgtgagccgctcagctgccctgtgcctcgcctacctcatgaagtaccacgccatgtccctgctggacgcccacacgtggaccaagtcatgccggcccatcatccgacccaacagcggcttttgggagcagctcatccactatgagttccaattgtttggcaagaacactgtgcacatggtcagttccccagtgggaatgatccctgacatctatgagaaggaagtccgtttgatgattccactgtgagccatcccacgagcccctgcattggagtcagaggtacagatctattgttgatcttacaccaagatccaaacttgaacattctacttttgttgatacagaaaaaaacagatgatgccttttatgagcacaaaaaagagttgctgtagcttttaactttataatccattttttttcagattaaactaattgtgagatggtgaarawaaattttctgccctgtgagtgaacatgggcagggggtaggttgaggcagatggtgcccagaagaaagagggnagcacccttgcacatggcaggccgggattcctgcag

SEQ ID NO: 264 - DNA, 1043 bp, Homo sapiens
gataagtagcaaaaaaaagaaaaagatgatgtatctcacaaccagaaatgcagaatttgatcgtcatgaaatccagatatatgaggaggtagccaaaatgcctcccttccagagaaaaacattagtattgataggagctcaaggtgtaggccgaagaagcttgaaaaacaggttcatagtattgaatcccactagatttggaactacggtgccatttacttcacggaaaccaagggaagatgaaaaagatggccaggcatataagtttgtgtcacgatctgagatggaagcagatattaaagctggaaagtatttggaacatggggaatatgaaggaaatctctatggaaccaaaattgattctattcttgaggttgtccaaactggacggacttgcattctggatgtcaacccacaagcactgaaagtattgaggacatcagagtttatgccctatgtggtatttattgcggctccggagctagagacgttacgtgccatgcacaaggctgtggtggatgcaggaatcactaccaagcttctgaccgactctgacttgaagaaaacagtggatgaaagtgcacggattcagagagcatacaaccactattttgatttgatcatcataaatgataatctagacaaagcctttgaaaaactgcaaactgccatagagaaactgagaatggaaccacagtgggtcccaatcagctgggtttactgatgattcagtaaggttaacaatgaaaattaaactcttaaaaagtgactgcaacaaataaaccttctactgagaaaatacatcacagatagaagattatctgctaagtccaggcatttttatggtgtagattgaaataatagtacacttctgaatttttatataaaatgtggttggaaggtgtactaatatataatttatcttaatttttctaactttgtatggataatctttctattcatatcacataaagaaatgcgttgaagcattttgtatatgttttgatttagtacccttgcctttttcatcaaaggaattttcc

SEQ ID NO: 265 - DNA, 899 bp, Homo sapiens
  misc_feature (867): n equals a,t,g, or c
  misc_feature (876): n equals a,t,g, or c
  misc_feature (879): n equals a,t,g, or c
  misc_feature (881): n equals a,t,g, or c
  misc_feature (894): n equals a,t,g, or c
ggtggctctcstgctcgcgtcataggccgaacaaccaaacagaaaagtttaataaacagcggacggaggggccggcggtggcggagccggagcaagcaggggttcggcggcattacctgtacccattcaccggcggctaccggcggcggcgcgcagcgtgtcaggcggagagacccgccgccaggaatgaatctgaagtctgctgcagtaaaacacagaaggctttaaaatgttttcttgcataaaattcaaaacttttaagtagctgcttatgagaatagggaaggcagaaagctaatgtctgtctcaagatacaggacagctgtttgctcatcaacctcaactgtgtgtgcaactgaggaacatggctcaagaaactaatcacagccaagtgcctatgctttgttccactggctgtggattttatggaaaccctcgtacaaatggcatgtgttcagtatgctataaagaacatcttcaaagacagaatagtagtaatggtagaataagcccacctgcaacctctgtcagtagtctgtctgaatctttaccagttcaatgcacagatggcagtgtgccagaagcccagtcagcattagactctacatcttcatctatgcagcccagccctgtatcaaatcagtcacttttatcagaatctgtagcatcttctcaattggacagtacatctgtggacaaagcmgtacctgaaacagaagatgtgcaggcttcagtatcagacacagcacagcagccatctgaagagcaaagcaagtctcttgaaaaaccgaaacaaaaaaagaatcgctggttcatgtgcaggaaagaaagtgggacttactgggtttgaatgccggtggtggaaanggttactgnggngnacaccggtacttnagatg

SEQ ID NO: 266 - DNA, 837 bp, Homo sapiens
  misc_feature (613): n equals a,t,g, or c
  misc_feature (776): n equals a,t,g, or c
  misc_feature (807): n equals a,t,g, or c
  misc_feature (834): n equals a,t,g, or c
gcggaggcagcctagcctcgcgccccgcccgttgcttctgccctccggccttcccgccgccgtcgccgggaccagccgctcggggccgggctgatacagccgcttcaccgtgcccctgcccgcgaccatggcctcctccgaggtggcgcggcacctgctctttcagtctcacatggcaacgaaaacaacttgtatgtcttcacaaggatcagatgatgaacagataaaaagagaaaacattcgttcgttgactatgtctggccatgttggttttgagagtttgcctgatcagctggtgaacagatccattcagcaaggtttctgctttaatattctctgtgtgggggaaactggaattggaaaatcaacactgattgacacattgtttaatactaattttgaagactatgaatcctcacatttttgcccaaatgttaaacttaaagctcagacatatgaactccaggaaagtaatgttcaattgaaattgaccattgtgaatacagtgggatttggtgaccaaataaataaagaagagagctaccaaccaatagttgactacatagatgctcagtttgaggcctatctccaagaagaactgaagattaagcgntctctctttacctaccatgattctcgcatccatgtgtgkctytacttyatttyaccgacaggscactctctgaagacacttgatctyttaaaccatgaagaaccttgaacagcaaggtaaaacattataccagtggattgcccaaagcagataacggttttcnaaaaactggaattaacagaagttttaagatncaaggctcctggagttggaattgggtncag

SEQ ID NO: 267 - DNA, 159 bp, Homo sapiens
ttcatgaagacatctttgacatcatagaccgagaagcagatggaagtgacagtttggagctccagaacagctccagagtgataaagggcttcgtgctgtgtcaytccattcgytgggggtacgggttctgggccgggggttcctacctcctgggagcga

SEQ ID NO: 268 - DNA, 864 bp, Homo sapiens
ttttttttttttttttcctttctagccacacaacagtgttatttcaagaaaacaaaacaagtcagagaaagaaaaattacctattacctattggcacatttctgttacgtcaagtctgggcttaagccctgttggtcctgttaagctctttttgttctgtatcaagcaggagtgtcttgagttctttctaatccccatacatcatgtctttgaaatgacaaaagtcccatcctttgttgcccgtgcagtaatctgcttgtggaactctttaagaacatccagctggccaggcctgatgtggatgtatgaccggatcttggcgatggctcttacagcctcctctggactccatttgtgcacctgaatcaggtatgctgccaccatagtggcactcctggagcgcccagccttacaatgcacgtaaacacactggcccagcgactggtacttgagagcaaattggactcccttctggaggttgtccaaggtggggatcccagtcatgtctactgtgctgagccgcagctgctcgactcctagtctcttccactcctgtgaagagttgcacaggaacctcgtctcgtactcctcgttcatggtgatcaccccgcgcacgttctcgtcctgtaccagctggcgcgtcaagctccgcaacggcagcgcgcccagcagcacggtggggtcgatgcggtggtaccagtcccggtgcgcccgacccggcaccttcccgcggaacagggtgtagagcagcgtcgggtagaagagcacccgcgccaggccggcctccagcagcgcggtggccgccatcccggcccggcgcagcggcgacccgtcggcccccgcgctcgcagcccacgcgtccgc

SEQ ID NO: 269 - DNA, 645 bp, Homo sapiens
ttgaggaaaacaaatgtgtttattttctctatttttctgtaaattctgtgttttacattagcgttgttaacactgcaccaatttctgtcaatagatttctccagaggacattgtgttcatgacaatctatcaccacaaggcaaaatcagacagaatttggggagagcatgaaatttgttaccttctgcttgtgaggaaacgtcactctgaacccggatcccagtgaaacgaaaagcatcctctacctgtcccaggaggagctgtgggagctgctggagagggaggcgaggggtgaagtcaaagtcaccccctggctaagaaccattgccgagaggtttctgtaccggtggtggcctcacctggatgacgtgaccccgtttgtggagcttcacaaaatacacagagtgtgagaggcagggaggtcgagtcagccatgtgtaatgccctcagtgcaggcagacgcaccattgaggcaatgatacaccctctccaaaaaacagggcaaaaggggcacttgattgcccatcatgtataaatcactatttcaaccttttcatcaactttgtcatatcttcattttcccttttccttatttccatatttctcatctgcctggttgcagggaggaaatcggacgtcgtgggt

SEQ ID NO: 270 - DNA, 3767 bp, Homo sapiens
  misc_feature (544): n equals a,t,g, or c
gatgcccagttcgaggcctacctgcaagaggaawtgaagattaaacgttctctcttcaactaccatgacacgaggatccatgcctgcctctactttattgcccctactggacattcactaaagtccctggatctggtcaccatgaaaaagctggacagtaaggtgaacatcattccaataattgcaaaagctgacaccattgccaagaatgaactgcacaaattcaagagtaagatcatgagtgaactggtcagcaatggggtccagatatatcagtttcccactgatgaagaaacggtggcagagattaacgcaacaatgagtgtccatctcccatttgcagtggttggcagcaccgaagaggtgaagattggcaacaagatggcaaaggccaggcagtacccctggggtgtggtgcaggttgagaatgaaaatcattgcgattttktgaaacttcgagagatgctgatccgcgtgaacatggaggacttgcgagagcagactcacacccgccactatgaattgtaccgacgctgtaacttgnaagagatggggttcaaggacactraccctgacagcaaacccttcagtcttcaggagacatatgaagcaaaaaggaatgaattcctgggagaactgcagaagaaagaagaagaaatgagacaaatgtttgttatgagagtgaaggagaaagaagctgaacttaaggaggcagagaaagagcttcacgagaagtttgaccttctaaagcggacacaccaagaagaaaagaagaaagtggaagacaagaagaaggagcttgaggaggaggtgaacaacttccagaagaagaaagcagcggctcagttactacagtcccaggcccagcaatctggggcccagcaaaccaagaaagacaaggataagaaaaatgcaagcttcacataaagcctggcaagccaaggatgttcccgcattcacctgcttttgcagtaatatcgtatctctgccatgtgtgttctttagttttattttattttattttatttttttacccttcctcaaacaccagtaactattattaactcgttttgctgaatgttgttgggtggtagaaaatgatagaacaagggaataaccgcgaatgctctgtgcagctggactctgtttccggaaagtaaatgatttgctttttatgcctgttctgaatggcagcacgaagcaggcctgttacttgtatgtcgctttggacagaggaaagtggggtaaaatgctacctgtacgtctgacatgaaaacttctcaccgcctcagcagctgaactaaaaacctgaatagccatgacaagagtttgcattttcttgatgattcatctccatgagtgcacaatccctgaactcactgtcttttctccacacttgtcctaagccaaggtagatttgtacgtagacagactggtgagcaagcattatattttatttttacccttgcatgacattttcattttaatcaataacattatttggcctgagcttgtgggtctgttcagactgtctcctctcatggtttgaaactgcatctgaatgcctgccttcaatcctggccaagttggagtagactggtatgagaaaactatgattagttcacatttactggtgcatccttgatcctctcacagatagaggtcttaaaggttggatcatgtaacattgcttagtagaagaatcttcttctaaggatgatgggctttctacagcctgcttaccactaacagtaaggaatctttcataaacacacctcagtttgttcccagtgggcttagagggaggacctgatgactgattccaggatacttgtacttctaataacatttttcatgaatcatgagaaaatttccacagatacttcccttagaaaatttgctataaactctgtatcattggtagcacaaatttgagcgaggccttgtcaattttaaggtggaaataggaaggaccacaacatgacccgtaagtcaagaaggtagacatttcatatccagcttccttgcttagtctcctttcagtatttggcaataaaagaaagaagaaatagaacagctgaagtctcaaatcattgtctggaattttcctcaccttggctagctccacctgctctttgtctaaggcccttgcctcatcagggattagaactggcccatatgccagaacctgtactaaatgcctaatttgtatggaagagtgcatatttaatctcttttctatactgctcctttctgatgcttatcctttcatctgtgtgattgttttttcccctctactaacaagatcctcccagctttctctctacatgtagaaaggataacatttctcatgaacccactgcccctctgcattttcctcactggttagagattaagtaaataggatagaatatgctgcgtctcccctgacacacactttcttttttgaatgagcaagtctccattttgatttcagcaaagattttttctccttttctttgtcctcaaccatacttagaggaaagaaggaatggtcttccatgaactgattatgcttaattaagcaaagtaaggaaattagtttcatggaagcctaaacaaagctggaatagaaactacacactagacacagcagtagtcatagtcttcacaggtttaggagctactggaccaacattcttgtttttgcttttgtttttttaaataattctagtctggagctaactgtggagcagccaaatagtagctggcatgttgattcaaaccatgggctgaatttgctcataggctgtgcatcagacaaaagcttgaatatttgtgttgtatgcttgttccaaccaccgcttgtgtgagcatttttgtggcttgtacagaaagtacacttttaaattgtctcttgcatcactaaaatttttttaaaatgagcataacaacgaaaggcatccagctgactttttgattccaagattattgattggattgacttttttgcattaaatttttcccagcaaaataaatcatatggcgagtcagggaataaaaagtcaaaagaaacaaatagaagctttttttttwaaaaaatgtattgcttctgaacttttttctgccactgctccctagccctgtttagtttgttattgctgcttttcttttttctttctgtatctatgcctttttttcacagtagtccttggctctgcacggaataaatgataccctcaaatctaattggatgtgctttcgcctttgcatgtaagtacggtagtaagaaacctttgagatctttctgacttttcaaaattagagaaagcaaatgggatggatagattttttttttcttttcaaggggggcaggaaggtaatggtttgagtagcctttgtttaaaaaaaaractaaatatatttaaaaggccacatttatatttttttcacaagaaccacataataaattccacttcttgacctgaatttggaaatccgaaattactaatccaggccaggtgtggtggctcatgcctgtaatcccagcaytttgagaggccgaggtgggcagatcacttgaggcctggagttcaagaccaccttggcgaacacggtgaaaccccgtctctacaaaaaatacaaaaattagccaggcgtggtggcacgtgcctgtagtcccagctacttgggaggctaagtcaggagarttgcttgaacttgggagatggaggttgcagtgagccaagattgcaccactgcattccaacctgggtgatgaagtgaga

SEQ ID NO: 271 - DNA, 1626 bp, Homo sapiens
catagctgcgggtggctgtgctggtggcgttcaagatgtcgaccaagaatttccgagtcagtgacggggactggatttgccctgacaaaaaatgtggaaatgtaaactttgctagaagaaccagctgtaatcgatgtggtcgggagaaaacaactgaggccaagatgatgaaagctgggggcactgaaataggaaagacacttgcagaaaagagccgaggcctatttagtgctaatgactggcaatgtaaaacttgcagcaatgtgaattgggccagaagatcagagtgtaatatgtgtaatactccaaagtatgctaaattagaagaaagaacaggatatggtggtggttttaatgaaagagaaaatgttgaatatatagaaagagaagaatctgatggtgaatatgatgagtttggacgtaaaaagaaaaaatacagagggaaagcagttggtcctgcatctatattaaaggaagttgaagataaagaatcagagggagaagaagaggatgaggatgaagatctttctaaatataagtyagatgaggatgaggatgaagatgacgctgatctctcaaaatataatcttgatgccagtgaagaagaagatagtaataaaaagaaatctaatagacgaagtcgctcaaagtctcgatcttcacattcacgatcttcatcacgctcatcctccccctcaagttcaaggtctaggtccaggtcccgttcaagaagttcttccagttcgcagtcaagatctcgttccagttccagagaacgttcgagatctcgtgggtcgaaatcaagatccagctccaggtcccacaggggctcttcttccccacgaaaaagatcttattcaagttcatcatcttctcctgagaggaacagaaagagaagtcgttctagatcttcttcatctggtgatcgcaaaaaaagacgaacaagatcacggtcacccgaaagccaggtgattggtgaaaacactaaacaaccctgagcccagggccaacccctacggaacaccactactttacccagacgccacaggtcatcatctggatcatcccattctggttcccgttcaagttcaaaaaagaaataatgtattaaaatttacatcttaaaaaaatccagtacagtgcatgaagcatatttttwaagaagttggtgtcttacttggtcagaagtgctaaatctgctagtagaggtgcatgcctttcattgcttttcaaaacaatacagctgtgtttatttgtgaagttaaaagtaaatagcattttaagccataatgtcccaaaatagatgttctgtcattcattatttacaaccatttgcttcatttaaaaccatttcagctataacaaagtactttgcttcctaatttaaacccatttttgtcatttccaaatacatcctgtccattggctaagacaggattacctaggcttgcctgaactttgggcatggaagaaagactggaaactagttggaaacaacatacttatggaaaagaaagtcagcctttttatgctgttaacagatgtcagagtgattctcaccaaaaaaagttaaactatgttgtaagcagccaactgtaaatgtctattttgaaattccctatgcta

SEQ ID NO: 272 - DNA, 278 bp, Homo sapiens
  misc_feature (11): n equals a,t,g, or c
  misc_feature (12): n equals a,t,g, or c
cagccaggaannrttacgtgttccaggtacaggccatgaattcagctggtctggggcaaccgtccatgcccactgatcccgtgctcctggaggacaagccaggtgcccatgagatcgaggttggtgtggatgaagagggctttatctatttggcttttgaagcccctgaagcccccgactcctcagagtttcagtggtccaaagactacaagggcccactggacccccagagggtcaagatcgaggataaagttaacaagtccaaggtcatcctgaaa

SEQ ID NO: 273 - DNA, 1355 bp, Homo sapiens
  misc_feature (44): n equals a,t,g, or c
  misc_feature (55): n equals a,t,g, or c
  misc_feature (126): n equals a,t,g, or c
  misc_feature (132): n equals a,t,g, or c
  misc_feature (164): n equals a,t,g, or c
  misc_feature (1346): n equals a,t,g, or c
ggagataattttttaattccagcaaaagcggcacttcccttcgntccaggatgtnaatgttccagccggagatcagtttgatcactgggtttctgatctcatgactcagttcttcagttctccagntcttcntcggtaagcgtgtggcttgcggagatgtcttnatcggcatcagtgactatgactgagtaggtgcccaaatcctcgaggccggttctttcaggatgaccttggacttgytaactttatcctcgatcttgaccctctgggggtccagtgggcccttgtagtctttggaccactgaaactctgaggagtcgggggcttcaggggcttcaaaagccaaatagataaagccctcttcatccacaccaacctcgatctcatgggcacctggcttgtcctccaggagcacgggatcagtgggcatggacggttgccccagaccagctgaattcatggcctgtacctggaacacgtaactctttcctggctgcaagtcggaaaccctcaggtgggtgccagagatggggcctggggtgaccggcttccactgctcagagccttcctcctggaaactgacgtgatagcctgtgacaggcccagcccccatatacagtgggggttcccactgcagcaccagggatgtagcccgcacctcggatgcccgtacatcgtacggggggcctggctggggcattgtccactctttgcactcaaacaggctgctgggtgccgacagctcgccaacacctgcccagttggcagcccgggcacggaactcatagaagtggccttcatgaaggtcactgaccttgcagacccgggtggggatgggctcgtgccgaattcctgcagcccgggggatccactagttctagagcggccgccaccgcggtggagctccagcttttgttccctttagtgagggttaatttcgagcttggcgtaatcatggtcatagctgtttcctgtgtgaaattgttatccgctcacaattccacacaacatacgagccggaagcataaagtgtaaagcctggggtgcctaatgagtgagctaactcacattaattgcgttgcgctcactgcccgctttccagtcgggaaacctgtcgtgccagctgcattaatgaatcggccaacgcgcggggagaggcggtttgcgtattgggcgctcttccgcttcctcgctcactgactcgctgcgctcggtcgttcggctgcggcgagcggtatcagctcactcaaaggcggtaataccggtatycacagaatmaggggataccaggaaagaacatgtgagcaaaaggccagcaaaaggccaggaacccgtaaaaaggcccncgttgctgg

SEQ ID NO: 274 - DNA, 1057 bp, Homo sapiens; identical to SEQ ID NO: 162

SEQ ID NO: 275 - DNA, 781 bp, Homo sapiens; identical to SEQ ID NO: 163
  misc_feature (762): n equals a,t,g, or c
  misc_feature (769): n equals a,t,g, or c

SEQ ID NO: 276 - DNA, 551 bp, Homo sapiens
  misc_feature (483): n equals a,t,g, or c
  misc_feature (513): n equals a,t,g, or c
  misc_feature (532): n equals a,t,g, or c
  misc_feature (551): n equals a,t,g, or c
gaatttgaggagattgtccagattgttctgcagaagtcccttcaggagtgcttgggtcaatgtctggtctgggtccagtgttccttcccaaactgtgggaaatggaggcggctgtgtgggaacattgacccctcagttctcccagataattggtcctgtgatcagaacacagatgtgcagtataatcgctgtgatattcctgaggagacctggacagggcttgagagtgatgtggcctatgcctcctacatcccaggatccatcatctgggccaagcaatacggttacccctggtggccaggcatgatagaatctgatcctgacttaggggaatattttctttttacttcccatcttgattccctgccgtctaagtaccatgtgacgttttttggagaacagtttctcgtgcatggatcccagtcaacatgctaaagaacttccaggagctgtccctggagctatcagtcatgaaaaacgcanaaatgactgcagccagaaactgggggtggncctgatgatggctcaagangcagaacagatcagcattn

SEQ ID NO: 277 - DNA, 1357 bp, Homo sapiens
  misc_feature (5): n equals a,t,g, or c
  misc_feature (149): n equals a,t,g, or c
gtatntgggcgtttatcttgtacccggcaagatgtgggttatgtccagggcatgtccttcatagcagcagtgttgatcttgaccttagatacgcagatgcttttatgccttttctacyttctgaataaccctgtcaaatggmgtttttnagagtggaccatggccttatgttgacttattttgctgcatttgaagtattctttgaagaaaatttgccgaaattatgtgcgcatttcaagaagaacaacctaactccagatatctacctaattgattggatctttaccttatatagtaaatctctgcccctcgacctggcctgtcgtatctgggacgtgttctgtcgcgatggggaagagttcctgttccgcacggccctgggcatcctgaagctgttcgaggacatcctgaccaagatggacttcattcacatggcccagttcctgacccggctgcccgaggacctgcccgccgaggagctgtttgcctccatcgccacgatccagatgcagagccgaaacaagaagtgggctcaggtactgactgcattgcagaaagacagccgggaaatggagaagggaagtccgtccctccgacactgaggctgcagcgggaattcgcactcggcaccaatcagagccccatgccgcggcccctctgttgtttcagactgacacccgggcagccgagaagaacagacgctctttaagtttgattcctaacactggagttggccttaaacaaaacaaacacaaaaacttttaaagaattaaaccaaggcttagccttaagcagctcagtggaaggatgagctgctgcggaccacagccagccactgcatctgctgcacagttgaacgatgggcagtggctcacccccactcctttatttcagcaaaagctaattaaattgtaatgtttctatgtcaactactgggaagtatgttacagtcttagccaggatgcatgagagatgttatttgggagacttgagatgctttggctgatatttacatgttttcgataagaaagggatcgctgattgakttattgagatagtttttccagagctggaggtcacgtttctaaaactcacctacgaaagatagcattaaaggaacaggggctctctgaggatggccactgatgtgtgtttgtggatacctgggcatcgacccagcctgcaggtgagctcygggccatgttgccttgacacagtcacagtgtagaggctgcaggtgcacacgtgggctccagtgggactgcgctctgggagactgctccctggcatcggtcctgcggaggtggaaagttcgagaggaggagctatttgcgaggaagccctgtgggcaatagag

SEQ ID NO: 278 - DNA, 699 bp, Homo sapiens
attcggcacagggcgggactgctccggccgcaccatgcgsagctggccattgagatcggggtgcgagccctgctcttcggagtcttcgtttttacagagtttttggatccgttccagagagtcatccagccagaagagatctggctctataaaaatcctttggtgcaatcagataacatacctacccgcctcatgtttgcaatttctttcctcacacccctggctgttatttgtgtggtgaaaattatccggcgaacagacaagactgaaattaaggaagccttcttagcggtgtccttggctcttgctttgaatggagtctgcacaaacactattaaattaatagtgggaagacctcgccccgatttcttttaccgctgctttccagatggagtgatgaactcggaaatgcattgcacaggtgaccccgatctggtgtccgagggccgcaaaagcttccccagcatccattcctcctttgccttttcgggccttggcttcacgacgttctacttggcgggcaagctgcactgcttcaccgagagtgggcggggaaagagctggcggctctgtgctgccatcctgcccttgtactgcgccatgatgattgccctgtcccgcatgtgcgactacaagcatcactggcaagattcctttgtgggtggagcatcggctcatttttgcatacatttgctacag

SEQ ID NO: 279 - DNA, 272 bp, Homo sapiens
gcgcggcagtatccttggggcactgtgcaggttgaaaacgaggcccactgcgactttgtgaagctgcgggagatgctgattcgggtcaacatggaggatctgcgggagcagacccacacccggcactatgagctgtatcgccgctgtaagctggaggagatgggcttcaaggacaccgaccctgacagcaaacccttcagtttacaggagacatatgaggccaaaaggaacgagttcctaggggaactccagaaaaaaaaaaaaaaaatgac

SEQ ID NO: 280 - DNA, 1882 bp, Homo sapiens
  misc_feature (47): n equals a,t,g, or c
  misc_feature (1789): n equals a,t,g, or c
  misc_feature (1807): n equals a,t,g, or c
  misc_feature (1808): n equals a,t,g, or c
  misc_feature (1862): n equals a,t,g, or c
cgcattaatgtgagttagctcactcattaggcaccccaggctttacnctttatgcttccggytcgtatgttgtgtggaattgtgagcggataccaatttcacacaggaaacagctrtgaccatgattacgccaagctcgaaattaaccctcactaaagggaacaaaagctggagctccaccgcgktggcggccgctctagaactagtggatcccccgggctgcaggaattcggcacgagctcctctgtttcctgtgcagtagctcccgttgcggcggcacccgtggcagccctggcggacgcaggagcgatggcagcgaccgatatagctcgccaggtgggtgaaggttgccgaactgtccccctggctggacatgtggggtttgacagcttgcctgaccagctggtgaataagtccgtcagccagggcttctgcttcaacatcctgtgcgtgggagagacaggtttgggcaagtccaccctcatggacaccctgttcaacaccaaattcgaaggggagccagccacccacacacagccgggtgtccagctccagtctaatacctatgacctccaagagagcaacgtgaggctaaagctcacgatcgttagcacagttggctttggggaccagatcaacaaagaggacagctacaagcctatcgtggaattcatcgatgcacaattcgaggcctacctgcaggaagagctaaagatccgaagagtgctacacacctaccatgactcccgaatccatgtctgcttgtatttcattgcccccacgggtcattccctgaagtctctggacctagtgactatgaagaagctggacagtaaggtgaacatcatccccatcattgccaaagcagatgccatttcgaagagtgagctaacaaagttcaaaatcaaaatcaccagcgagcttgtcagcaacggagtccagatctatcagtttcctacagatgatgagtcggtggcagagatcaatggaaccatgaacgcccacctgccgtttgctgtcattggcagcacagaagaactgaagataggcaacaagatgatgagggcgcggcagtatccttggggcactgtgcaggttgaaaacgaggcccactgcgactttgtgaagctgcgggagatgctgattcgggtcaacatggaggatctgcgggagcagacccacacccggcactatgagctgtatcgccgctgtaagctggaggagatgggcttcaaggacaccgaccctgacagcaaacccttcagtttacaggagacatatgaggccaaaaggaacgagttcctaggggaactccagaaaaaagaagaggagatgagacagatgttcgtccagcgagtcaaagagaaagaagcggagctcaaagaggcagagaaagagctgcacgagaagtttgaccgtctgaagaaactgcaccaggacgagaagaagaaactggaggataagaagaaatccctggatgatgaagtgaatgctttcaagcaaagaaagacggcggctgagctgctccagtcccagggctcccaggctggaggctcacagactctgaagagagacaaagagaagaaaaagtaastwgcwggctgctctggggtggtgccttctctttcctcctgctcatcctcccagggcaggacgtggcacctgaaggggctgaggactggtgaccagaggtgagcttgtggcttgtcagactggttgaggtacctataacttggtcccagcatccctgtggcacctttggattcctgagctttggggggagttgganagtaggaagaggggtgtnngtccccaggaggcccaagcccatcttttcccaggtttggttcaaggaaagcccngcaaactcaaagggcccaat

SEQ ID NO: 281 - DNA, 1102 bp, Homo sapiens
ggcacgagctcctctgtttcctgtgcagtagctcccgttgcggcggcacccgtggcagccctggcggacgcaggagcgatggcagcgaccgatatagctcgccaggtgggtgaaggttgccgaactgtccccctggctggacatgtggggtttgacagcttgcctgaccagctggtgaataagtccgtcagccagggcttctgcttcaacatcctgtgcgtgggagagacaggtttgggcaagtccaccctcatggacaccctgttcaacaccaaattcgaaggggagccagccacccacacacagccgggtgtccagctccagtctaatacctatgacctccaagagagcaacgtgaggctaaagctcacgatcgttagcacagttggctttggggaccagatcaacaaagaggacagctacaagcctatcgtggaattcatcgatgcacaattcgaggcctacctgcaggaagagctaaagatccgaagagtgctacacacctaccatgactcccgaatccatgtctgcttgtatttcattgcccccacgggtcattccctgaagtctctggacctagtgactatgaagaagctggacagtaaggtgaacatcatccccatcattgccaaagcagatgccatttcgaagagtgagctaacaaagttcaaaatcaaaatcaccagcgagcttgtcagcaacggagtccagatctatcagtttcctacagatgatgagtcggtggcagagatcaatggaaccatgaacgcccacctgccgtttgctgtcattggcagcacagaagaactgaagataggcaacaagatgatgagggcgcggcagtatccttggggcactgtgcaggttgaaaacgaggcccactgcgactttgtgaagctgcgggagatgctgattcgggtcaacatggaggatctgcgggagcagacccacacccggcactatgagctgtatcgccgctgtaagctggaggagatgggcttcaaggacaccgaccctgacagcaaacccttcagtttacaggagacatatgaggccaaaaggaacgagttcctaggggaactccagaaaaaaaaaaaaaaaa

SEQ ID NO: 282 - DNA, 1954 bp, Homo sapiens
  misc_feature (1598): n equals a,t,g, or c
  misc_feature (1599): n equals a,t,g, or c
  misc_feature (1907): n equals a,t,g, or c
  misc_feature (1915): n equals a,t,g, or c
acggcaatctctgcggcagtcttctgtcggaagtaacgttgctatcccagaatcctcagagaaggagtagcgcgttcgtgcgtcctagttccagtacagcgtggagggtttaggcagcgtgttctgattctttgcgggacggcgagcgcatttgtgctttgcccgccgcggcctaggaggccttttgaggccgcgtagtcggtgtttttgaactgactctacagcttctggcaggccgtgcggcgccctgacccggcctcaccatgttggtgctgtttgaaacgtctgtgggttacgccatctttaaggttctaaatgagaagaaacttcaagaggttgatagtttatggaaagaatttgaaactccagagaaagcaaacaaaatagtaaagctaaaacattttgagaaatttcaggatacagcagaagcattagcagcattcacagctctgatggagggcaaaatcaataagcagctgaaaaaagttctgaagaaaatagtaaaagaagcccatgaaccgctggcagtagctgatgctaaactaggaggggtcataaaggaaaagctgaatctcagttgtatccatagtcctgttgttaatgaacttatgagaggaattcgttcacaaatggatggattaatccctggggtagaaccacgtgaaatggcagctatgtgtcttggattggctcacagcctgtctcgatatagattgaagtttagcgctgataaagtagacacaatgattgttcaggcaatttccttgttagatgacttggataaagaactaaacaactacattatgcgatgtagagaatggtatggctggcatttccctgaattaggaaaaattatttcagataatttaacatactgcaagtgtttacagaaagttggcgataggaagaactatgcctctgccaagctttctgagttgctgccagaagaagttgaagcagaagtgaaagcagctgcagagatatcmatgggaacagaggtttcagaagaagatatttgcaatattctgcatctttgcacccaggtgattgaaatctctgaatatcgaacccagctctatgaatatctacaaaatcgaatgatggccattgcacccaatgttacagtcatggttggggaattagttggagcacggcttattgctcatgcaggttctcttttaaatttggccaagcatgcagcttctaccgttcagattcttggagctgaaaaggcacttttcagagccctcaaatctagacgggatacccctaagtatggtctcatttatcatgcttcactcgtgggccagacaagtcccaaacacaaaggaaagatttctcgaatgctggcagccaaaaccgttttggctatccgttatgatgcttttggtgaggattcaagttctgcaatgggagttgagaacagagccaaattagaggccaggttgagaactttggaagacagagggataagaaaaataagtggaacaggaaaagcattagcaaaaacagaaaaatatgaacacaaaaggtgagtacatttaagtgaggatggggtgaatagttttttttaaatgttaattattgacagtaatttnntattgtaaacttcaccttgatgtgcccatagttttttcaaatttatttatttgaccaaaattgtgtatgtytattgtgtgtatgttgttttggaaaatgtgcacattgaggaatgattaagtcaagctcattaacatgcattgtcttatgtactttttttgtggtgaggacaccttaaaatctacttagcaattttcaagaatataatacattgttagctgtagttaaccatgttgtgcacccctaatttttttccatgccatttagttttccgcattaacttctactagttttccattcatatacgnatttaaantgattccatttcccaggtattggatagtgaaattttttt

SEQ ID NO: 283 - DNA, 1158 bp, Homo sapiens
  misc_feature (991): n equals a,t,g, or c
  misc_feature (1131): n equals a,t,g, or c
  misc_feature (1133): n equals a,t,g, or c
gtgagccaccgtgcccagcctgaagtgttaaattttatgttgtgtatgttttaccacaataaatccctttaagttttgtttgtttgtttttaatctactacagccttgttagatgacttggataaagaactaaacaactacattatgcgatgtagagaatggtatggctggcatttccctgaattaggaaaaattatttcagataatttaacatactgcaagtgtttacagaaagttggcatccttttcattggctttctactttttcttttgactatttgctggattttatataatttgttgaagagtgattctccctcatcctctgcaaacattccataggcgataggaagaactatgcctctgccaagctttctgagttgctgccagaagaagttgaagcagaagtgaaagcagctgcagagatatcaatgggaacagaggtttcagaagaagatatttgcaatattctgcatctttgcacccaggtgattgaaatctctgaatatcgaacccagctctatgaatatctacaaaatcgaatgatggcccattgcacccaatgttacagcatggttggggaattaagttggagcacggcttattgctcatgcaggtgatggttttaatgtaatttgtaaatatgagtgtttgaagtattttctggktaggattttgkttacatctttaaactacagctgttaaagaaattttagctgataacacaaaagtagatgatatgtgggagatcactaarggccaagtgttcaatgatgatttctatttgtttgcctgatttccttttggataatgaargcatctttagtcactacctcttctgagacacttgtggtccattgttagaartttgttagggttaattagaacaatcggatgaatgcaggaggataaaacagttaacattttcataataaaaactcactagacctagatttgaatacagttttaagaaatcactgtagagaaaganaaaaaaaagaaatcactgtagaggatttgtgcccttggattggattaccttagtttcactattggagtgtggaggatgtaatatatttgactttccaaaaatattttccaacaactggatttataatcaaaactttgtananggtggtatggccgttattataaggg

SEQ ID NO: 284 - DNA, 449 bp, Homo sapiens
  misc_feature (418): n equals a,t,g, or c
  misc_feature (422): n equals a,t,g, or c
  misc_feature (430): n equals a,t,g, or c
tcgacccacgcgtccgaagcccagcagtatctgatggataatccaacttttgcagaagatgaggagttacaaaatatggacaaagaagatgcattaatttgctttgaagaacacattcgggctttagaaaaggaggaagaagaagaaaaacagaagagtttgctgagagaaaggagacgacagcgaaaaaatagggaatctttccagatatttttagatgaattacatgaacatggacaactgcattctatgtcatcttggatggaattgtatccaactattagttctgatattagatcactaatatgcttggtcagcctggatcaactgcacttgatcttttcaagttttatgttgaggatcttaaagcacgttatcatgacgagaagaaggttaataaaagacattctaaagggantttnttaagaanaaaaagaagggggggggaa

SEQ ID NO: 285 - DNA, 1226 bp, Homo sapiens
  misc_feature (1186): n equals a,t,g, or c
  misc_feature (1221): n equals a,t,g, or c
ccgaagcccagcagtatctgatggataatccaacttttgcagaagatgaggagttacaaaatatggacaaagaagatgcattaatttgctttgaagaacacattcgggctttagaaaaggaggaagaagaagaaaaacagaagagtttgctgagagaaaggagacgacagcgaaaaaatagggaatctttccagatatttttagatgaattacatgaacatggacaactgcattctatgtcatcttggatggaattgtatccaactattagttctgatattagattcactaatatgcttggtcagcctggatcaactgcacttgatcttttcaagttttatgttgaggatcttaaagcacgttatcatgacgagaagaagataataaaagacattctaaaggataaaggatttgtagttgaagtaaacactacttttgaagattttgtggcgataatcagttcaactaaaagatcaactacattagatgctggaaatatcaaattggctttcaatagtttactagaaaaggcagaagcccgtgaacgtgaaagagaaaaagaagaggctcggaagatgaaacgaaaagaatctgcatttaagagtatgttaaaacaagctgctcctccgatagaattggatgctgtctgggaagatatccgtgagagatttgtaaaagagccagcatttgaggacataactctagaatctgaaagaaaacgaatatttaaagattttatgcatgtgcttgagcatgaatgtcagcatcatcattcaaagaacaagaaacattctaagaaatctaaaaaacatcataggaaacgttcccgctctcgatcggggtcagattcagatgatgatgatagccattcaaagaaaaaaagacagcgatcagagtctcgttctgcttcagaacattcttctagtgcagagtctgagagaagttataaaaagtcaaaaaagcataagaagaaaagtaagaagaggagacataaatctgactctccagaatccgatgctgagcgagagaaggataaaaaagaaaaagatcgggaaagtgaaaaagacagaactagacaaagatcagaatcaaaacacaaatcgcctaagaaaaagactggaaaggawtctggtaatkgggatacttctggcagcgaactgagtgaaggggaattggaaaagcgmanaagaaccttttggagcactggatgatgatcataantatac

SEQ ID NO: 286 - DNA, 361 bp, Homo sapiens
  misc_feature (1): n equals a,t,g, or c
  misc_feature (2): n equals a,t,g, or c
  misc_feature (348): n equals a,t,g, or c
nngcccatggctgagacctctctcccagagctggggggagaggacaaagccacgccttgccccagcatcctggagctggaggagctcctgcgggcaggaatcttcttgcagccgtgtggacgaatttggcccaaccttttcataggagatgcggccacggcaaacaaccgctttgagctgtggaagctgggcatcacccacgtgctgaacgccgcccacaagggcctctactgtcagggcggccctgacttctacggcagcagtgtgagctacctgggggtgccagcccacgacctycctgattttgacatcagtgcctacttctcctctgcggctgacttcatccancgtgccctcaaca

SEQ ID NO: 287 - DNA, 518 bp, Homo sapiens
ttttttttttttttttttgtctttatgacgatgaatattttattatagagatggactgaactcacttttgcataaagaatctctgaattgggtcagggaaatccacccgctaagaggtcaccacccagctatccctgcctctgcctcagcccccacttgctgtttacatctcagggtcactagaaacagcagagcctgctgttcccagggccaggctggtggggttgggccaagggtcagggatcctggctgcctgccagatcagaaccgccccgtctcccgccccagtcggttgtccagaacctggagctgccggagaagcctgagttagggcagatattgcggtgggcctgcaccgtctggatggcctctaccagcgtcatgttctcayagatcatgaggaaggccaggacaagtgtggcagagcggcttacccccatggcacagtgtaccagcacgcggccttggggaacactkagggcagctcggatgtatcgagcaacaggcagaaagtagac

SEQ ID NO: 288 - DNA, 410 bp, Homo sapiens
  misc_feature (71): n equals a,t,g, or c
  misc_feature (95): n equals a,t,g, or c
ctgatactcgattcccttattaaccctcctaaagggaacaaaagctggagctccaccgcggtggcggccgntctagaactagtggatccctcggnttgcaggaattcggcacgagaaaaatagtttccgagtagcagagtaagcatcatactgtcgttagcagcagcgtggggcacgggcaggggcgggggtctgggtgatgttaaaggtagagatggagctttttccttaattgaaaaaaaaaaagtcatttgtgactcctgacttaaagcgagaacgaacatctccctggaccctggtgggctgaaaaaatagactctgaagaaaaacccctgctgtcctcacgcagccgcgggcagatgagctgtgatggcttccccgggtggggagggtggggcggccgccacctc

SEQ ID NO: 289 - DNA, 1695 bp, Homo sapiens
  misc_feature (2): n equals a,t,g, or c
  misc_feature (16): n equals a,t,g, or c
  misc_feature (864): n equals a,t,g, or c
cnctggatctcgattncgactataggrcgamttgggtaccgggccccccctcgtgycgctttttacccccaagatatctgtcttcagtagcgactgaatctgccactctcagaataagttccttgcatttattccaaataatctcgtttactctcacctgtttatgcaaattgtataaggtttcttatgcccaagcttgaaaaatgatttcccagtagacaagaggcggctacctatcctacagttacggtatttatttacataagaagatcttacaggagttctttgcttgaatccgttctaacacccgcggcagctgcacgcgctcacagaaggtggaggttacttgcccaggtacagacgacctcggggcagtgacgagcaaagaccagagactgctgagccctcgcatctgggtggcggaattgcctgcggggttttgcccttggtttactgaggggggtcttggttgctgctgaagccccccaccccttctaaagtgcaatgcaaaagggacatcatgtatatgcagcgtttgtttggaattttctttgcttttgttttctttgcggttgttctgtgtgcatggattccacacctctgccgtaggtagatccgtcagcgggcattattaccgtgtcttgtaaagggtcggttttgttatgcaacacgcagaatgctgtttttagccttgttttaccagagttgttttttttttcagttatttcttcaagggaaactaaatgatttagttggagcaaagctttaagtgtgttggcgtgcttctgtgtggctgtcctgtgtcgccaggtcgaagatcacagtgaggtagaggccctgccccatccccagggccgccagttngctccgtttgctttgagtttttagaccccagaggagatgagcttttccaagctgtgtctgggccagagcctctccttgcccttgctccatcccgacggtcaccgttgggtccacgcctccaccgccccatcttgccccaaacggaaagcgctgtatctgcagtggcagcccttccccacttcggctctgggagggtccagccagtgtcacctgggcccaccctttcctgcagctgccaggcccgtgcggtcagtgggacccggacgtgggcaggcgagctcgggaccctcccaggcagttcccacagctcttgcctcggctcaccagggtcacttccactgtcaggggcctgagggggcagctgtggctgcagggctgctctggactgaggggtcccaggccccgaggggtgcacgcctggctccccttggcacaggtgcgagtccgtttcttttcagcagaagggggaagaggtgtccgctgtgtgggctgctgactcctctgtgtgtgaggcccttcatctaagtgattgtgtattcagtttaattctcattatatttctatactgaaagaagatttttaacgaagggaaaaacaacagcaataacattcatatctctggagcagctaactcatacacgtaatgtctgcttttcgtacagaactagccaatgtaaaaacagttcacctgtaaatactttttcctttttcaccgttgtattatacatgtatatgctgggtcctttttcagaaactcttttcttacctgagagttgtcttgttttctgggctgtttttaactgaggaaaaaaaaaaaaaaaaaaaaaaaaa

SEQ ID NO: 290 - DNA, 1534 bp, Homo sapiens
  misc_feature (9): n equals a,t,g, or c
tccccgggnctgcagaattcggcagagtagccatggccttgcggctcctgaagctggcagcgacgtccgcgtccgcccgggtcgtggcggcgggcgcccagcgcgtgagaggaattcatagcagtgtgcagtgcaagctgcgctatggaatgtggcatttcctacttggggataaagcaagcaaaagactgacagaacgcagcagagtgataactgtagatggcaatatatgtactggaaaaggcaaacttgcaaaagaaatagcagagaaactaggcttcaagcactttcctgaagcggggattcattatccagacagtaccacaggagatgggaagcccctcgccaccgactataatggcaactgtagtttggagaaattttacgatgatccgagaagcaatgatggcaacagttaccgcctgcagtcctggttgtacagcagtcgcctgctgcagtactcagatgccttggagcacttgctgaccacaggacaaggtgttgtgttggagcgctccatcttcagtgactttgtgttcctggaggcgatgtacaaccagggattcatccgaaagcagtgtgtggaccactacaacgaggtgaagagcgtcaccatctgcgattacctgcccccccacctggtgatttacatcgatgtgcccgttccagaggtccagaggcggattcagaagaaaggagatccacatgaaatgaagatcacctctgcctatctacaggacattgagaatgcctataagaaaacctttctccctgagatgagtgaaaaatgtgaggttttacartattctgcaagggaagctcaagattcaaaaaaggtggtagaggacattgaatacctgaagttcgataaagggccgtggctcaagcaggacaatcgcactttataccacctgcgattactggttcaggataagtttgaggtgctgaattacacaagcattcctatctttctcccggaagtcaccattggagctcatcagactgaccgtgtcttacatcagttcagagagctgccgggccgcaagtacagccctgggtacaacaccgaggtgggagacaagtggatctggctgaagtgaacgggccgccttctgctccagctgcatcacagtgatggccaagctgcatcagccgcactctcctggacgccatatagctttaagatcgggggagggtaaataatgcaaaaattgcacagtggaagaaggggtctcacaaaaagcaatccatcctgtagtataggtaatggagttgggggaagcagcttccattctggatgtttggaaccctttagctttgttttggaatggcccaccattctcactggaaaacagtggtctgctgtgaaaggccagctctcggcagcccctgtggtttcagcgctgccgctctgtgtcattcaggttgtgcacattgtttttcttctgacttccagaaataaaagtgtttccatgggaaaaaaaaaaaaaaaaaaaaaaaaaaaaaaaaaaaaaaaccccggggggggcccggg

SEQ ID NO: 291 - DNA, 538 bp, Homo sapiens
gccctggagcccgcgctgcctgcgcaggccaaggaggagctggcggcagccatggtgcgcgtgctgcgggccaccggycgggcgcaggcgctggtgactgacctgggcactgcggagctggcgcgctgtggaggccgtgaggcgctgctgttccgggaaaacacattggccaccaaggctatcgatgagtacatgaagctcgtggcacaggattacctccaggagaccctggsmcaggttgtgcggcgtctctgtgcttctactgaggactgtgaagtggaccccagcaaatgtccagcctcggagctgccagagcaccaggccagacttcggaacagctgcsaggaggtcttcgaaaccattatccattcctacgagtgagaatcagggccccagcagcttagcccacccctgcttaccatgctagccccgacctccagtttagggtggccagataaaatacaggagacactcagttaaatttgatgcaataattgggaccatgcttatactaaaaaattactcatttgaaccaggg

SEQ ID NO: 292 - DNA, 1506 bp, Homo sapiens
  misc_feature (1492): n equals a,t,g, or c
  misc_feature (1501): n equals a,t,g, or c
  misc_feature (1506): n equals a,t,g, or c
ctggaagaattcgcgtggcaggagaggcggggcaattttgctgagctttctcgcgggcttgcagctgcggcaagtgctggcggcggctgctcgcgcaagtcagctggcgtgggaactaccctttgtagctgagaacggcttgtttattgctacaaagactctattgacattggtagcttcagcggcagcagcttcttacggtataaagctgttgcttcctgaagaggctacaagcatccttccctaggactgctgtaagctttgagcctctagcaggagacatgcctcggggacgaaagagtcggcgccgccgtaatgcgagagccgcagaagagaaccgcaacaatcgcaaaatccaggcctcagaggcctccgagacccctatggccgcctctgtggtagcgagcacccccgaagacgacctgagcggccccgaggaagacccgagcactccagaggaggcctctaccacccctgaagaagcctcgagcactgcccaagcacaaaagccttcagtgccccggagcaattttcagggcaccaagaaaagtctcctgatgtctatattagcgctcatcttcatcatgggcaacagcgccaaggaagctctggtctggaaagtgctggggaagttaggaatgcagcctggacgtcagcacagcatctttggagatccgaagaagatcgtcacagaagagtttgtgcgcagagggtacctgatttataaaccggtgccccgtagcagtccggtggagtatgagttcttctgggggccccgagcacacgtggaatcgagcaaactgaaagtcatgcattttgtggcaagggttcgtaaccgatgctctaaagactggccttgtaattatgactgggattcggacgatgatgcagaggttgaggctatcctcaattcaggtgctaggggttattccgccccttaagtagatctgaggcagacccttgggggtgtaaaagagagtcacaggtaccccaaggagtagatgccagggtcctaagttgaaaatgatgtcgattgggggcgggggacactgtatttgatatttgtgatcagtgatcattgttcaactgcgaaatagagtgtttgcttttgataatggaaaattgtattcgttttaaaattccgtttgttgagaataacaatatgtttaaaaatataattgaacaaatttttttctttgtttcctgtcattgacatttagtataacagttttgctaacgttctaaaatgaagtcgttccatcataatctatgatcttgtacagcacttatagaaataagctgttcttttgaagttgaaatacccagtaaaatgttgaagaaggatggaggatttcttcatatctgacgtttctgaaaccctttgtgtctgctgttgtgtgaagattgacatttaccatgattttccttagttactgcagaacatagagaaaaataaaagcctaacgaatagtaaaaaaaaaaaaaaaacctnggggggggncccgn

SEQ ID NO: 293 - DNA, 897 bp, Homo sapiens
  misc_feature (1): n equals a,t,g, or c
  misc_feature (2): n equals a,t,g, or c
  misc_feature (5): n equals a,t,g, or c
  misc_feature (31): n equals a,t,g, or c
  misc_feature (42): n equals a,t,g, or c
  misc_feature (839): n equals a,t,g, or c
  misc_feature (890): n equals a,t,g, or c
nnccncggggactttcaacggggatcttctntagtaaatccnacaaaagctggagctccaccgcggtggcggccgctctagaactagtggatcccccgggctgcaggaattcggcacgagaaattttgtctttccagagaaccatggtgtggtgttggtaaaagattcattatgagtctctgaaaatatatctttaccaactctgggagattttgaggatgatgctattaagaaagcccacatagagaaggattttattgctttctgctcttccgcatcaggtaacaggtttcttgtacacagaatatctttgtgggtgttatcaatagaaaaactcacaaccacccactagagggtagataagtgtacagaactttagataagatttttgaacacaaactaaagctttgttccaagtcatacacacaattctctttatccacagagagcaagtaagcacatcttttcactgagttggtaattaatgaactcctctctgttgcaaaatattttagaactgtgagagataacagagaattaaatggaagacgatccgcgctgtagcacataagaatctgactctgcgtaggaaaggtcctccatgttgagatcattcaatggaccaataggccccgacatcaagtattcacaggagacgaagtaggagcagtgktcarcaaagtagaatarcaagcgaggaactttgggcccctaaattaaagtgggktttacctagaacatgaagtatatwaagcmgaatatatatgcmttattctaaaggtatgctttgcagtaagaatattgctattattgactcatctagtcattaagtactttgnaaactagctcccttttttatccctgggctttccttgaattgctcactaaantatatga

SEQ ID NO: 294 - DNA, 3029 bp, Homo sapiens
ggcacgagagaggaccatgtcatacatacaaagtacaaagacttaatgagtcaacatcctataaattctgtattcaagcttgtaatgaagctggggaaggtcccctctcccaagaatatattttcactactccaaaatctgtcccagctgccttgaaagcccccaaaatagagaaagtaaatgatcacatttgtgaaattacatgggagtgtttacagccaatgaaaggtgatccagttatttacagtcttcaagttatgttgggaaaagattcagaattcaaacagatttacaagggtcccgactcttccttccggtattccagccttcagctgaactgtgaatatcgcttccgtgtatgtgccattcgccagtgccaagactctctgggacaccaggacctcgtaggtccctacagcaccacagtgctcttcatctctcagaggactgaaccaccagccagcaccaacagagacactgtggaaagcacaaggacccgacgggcactgagtgacgagcagtgtgctgccgtcatccttgtgctgtttgctttcttttccattttgattgcctttatcattcagtactttgtaatcaagtgaaaatataactttattttttaactctattacattttattttgtcatgtactaaaattatttctgtattgcttttataaaaaacagtggcatttagcactggcattgagactatagcacatcatttttgccattttcagtgcttatattgttaggtagaggctggcactttattagaatgcaagccacaaaaatatcaattttgttttttttgttagggtgggtcttctttttttctttccctctctctttttttaacaaatgccttcttatagaaaaactttctaagaggcaacaatttagaatggatattttgacgaatcggcatgagtgtaacagtgataacctgatctgtttgttttaaagattattaccaagtgaaaaattcagaatgaatagaatttacactaacatgctatataaaatgttaaagtctgatgctgtgaaagcaatctagtgctatatttctacctcctcatttgtcttaattatttggtaagtgggattatgatgagtaactggaggggcttagaaacaaaaactggatgaaagagtatgcatgaagaaaagcttctttgataaatgtggagttcttcattataaatatatattcatgaattcacagataagtacttaaagaacagacagtttacttggcctaaaaatattttgatgtttactcaaaaagtacctcttcaggtcttgagaacatggaaaagaattgagtgcttttaaatactttttagaaagtaatcataaaagtaaattgaatttcaaacctatttggcttctgttttgtgaacctttgaactatatgtatgtgtataagggtatacacatacatatatggcatataacaagtgtacacatatacacataacaagtgtagaagtatatattacatacatacactcactctgtctggtataggctaattttgaagaactcccataagtttctgctgcttctcccataactgctgccaccaccatcagaattcataatcaaacctaacctttttgtttggggcaccaaatctgaagacaaaattaatttgcaccagtaaacttcaagctgctttctttcttgaaaactaaacgtttaacgtataatgtctgtttggatactgttccaaattgttgattgcatgtggttaatgttgcattagagcactttgcaattgcataattcattaatgttttgtgagcttgcatttgtgagttattggatgatcagactgaattttgtcaagtatcacattgtacatcttgcctagatgtcgatgactgcaagtaataatacagtttataatgaaactatctacaattcttgttttagcacatctgttatccgtaaaacacctgtaactagcttttttaatttattatttgaattttaggatagcgaatcactaatttttagttgctgaggttggcattttagtgattattaagcacttctgtcagtctttgaaaaaagaacgtattttttgtgctttgaagatctctgaagaatttcttttataatagaatgggcatgtattgtaacagttttatgtcaaatgatctgtgctgtagaaaaacattaacccttgttcaaaaaagaaatggataaacttggcctttctaagtggtaagaatgacctgtcactataatatactgtatgtttacattttatttaaatttaatctcttatgtatagggtgataaccttccccagaaacaacagtgattgcgattgttttctagaaacttctttaaagtgccacatttggcagtacaaatgagtctgagtgtaatagcccagagatttatatatagttgaatgtctaaaatggtaaaatgtgccactgtgtcaagttacagtggcttatgtttttcatagtaattcaaatgaacttcctatttttgatagtaaatgtcatttaatagtatacttgccatttgagcctcactgcaaaattagtgcagaggagaaaacaatttttaatgtaatcttgattttacctcatatactgtacattccaaaaactctaaactttttaaagattatagatacactaccaaacatatcaccttaaaattgtataaggctgaatgaacttcatacaaatgaaaaaaatctcataaaaatacataaactatgtagcaaaagtatctgtaaaatccatggaaaataaaagttgtatcattctttttgagatacgtttattgtattcatatatattcattatttgctacctgtttaagaaagtgaaatgttatggtctcccctcttccaatgagcttaaaacatttttcccaacagtatataaatcttcaacatgagaggatgtatatttattatataaagcccagtaaagaataaaattagaagttttatcctagtaaaaaaaaaaaaaaaaaaaaaaaaaaaaaaaaaaaaaaaaa

SEQ ID NO: 295 - protein, 212 aa, Homo sapiens
  misc_feature (141): Xaa equals any of the naturally occurring L-amino acids
  misc_feature (159): Xaa equals any of the naturally occurring L-amino acids
AGFIRGFGPRMPAPIRLRELIRTIRTARTQAEEREMIQKECAAIRSSFREEDNTYRCRNVAKLLYMHMLGYPAHFGQLECLKLIASQKFTDKRIGYLGAMLLLDERQDVHLLMTNCIKNDLNHSTQFVQGLALCTLGCMGXSEMCRDLAGEVEKLLKTXNSYLRKKAALCAVHVIRKVPELMEMFLPATKNLLDEKNPWCPPHICSPPHQNV

SEQ ID NO: 296 - protein, 133 aa, Homo sapiens
  misc_feature (38): Xaa equals any of the naturally occurring L-amino acids
  misc_feature (92): Xaa equals any of the naturally occurring L-amino acids
RWRKRNLRTIVQLWILNQTREHLLCQQQPAVPPPPPSXLPLSNAAATDLCLQWFRPTCCTGNSTGIASAPQLSCSVPSANVCSPTTALDAAXCSSSAAAFKQLPAWEPCCCSGKFVQWKTIYISHREVSHSSQ

SEQ ID NO: 297 - protein, 97 aa, Homo sapiens
ISGYPAGIYCRIDCLPDVCGKTPPIWYQNCVVRVWQEKLSLFIPVYTQGFVLCHSIAGGTGSGLGSYLLERLNDRQACVWGEGINPGSLSNVIAFFS

SEQ ID NO: 298 - protein, 58 aa, Homo sapiens
  misc_feature (2): Xaa equals any of the naturally occurring L-amino acids
KXATAFLNLEPDRCYQVWVMAVNFTGCSLPSERAIFRTGKEMDAKGALEDNAQFFTDS

SEQ ID NO: 299 - protein, 164 aa, Homo sapiens
  misc_feature (52): Xaa equals any of the naturally occurring L-amino acids
  misc_feature (91): Xaa equals any of the naturally occurring L-amino acids
ARAETSSTHSESPVVVDLPDTPFIFKHTVNNSTAVISWTYALGKQPVSFYQXLLQEVAKTQENELPEAKNRPWIFNKILGTTVKLMELKPXTCYCLSVRAANTAGVGKWCKPYKFATLATDFSSFPENYPIQITVRRKEPRQKIVSSGPEEMPEAGGSGIPISW

SEQ ID NO: 300 - protein, 219 aa, Homo sapiens
RQFNREMKRKQAESERPILPANQKLITLSVQDAPTKKEFVINPNGKSEVCILHEYMQRVLKVRPVYNFFECENPSEPFGASVTIDGVTYGSGTASSKKLAKNKAARATLEILIPDFVKQTSEEKPKDSEELEYFNHISIEDSRVYELTSKMVKQETSDKSVIELQQYAKKNKPNLHILSKLQEEMKRLAEEREETRKKPKMSIVASAQPGGEPLCTVDV

SEQ ID NO: 301 - protein, 107 aa, Homo sapiens
MDGAQGRLLPVSSRHSNLALLKPTSRDLTAPPEGASLMTVGGITAPRDVQVWNPRTWESVTLRGKRDPAPVLQFRISWWGDDRGWLRWALSNHGGPYKGRGVTRVCA

SEQ ID NO: 302 - protein, 185 aa, Homo sapiens
  misc_feature (29): Xaa equals any of the naturally occurring L-amino acids
  misc_feature (151): Xaa equals any of the naturally occurring L-amino acids
  misc_feature (185): Xaa equals any of the naturally occurring L-amino acids
CQRTQSHTLSGPGIRGASPIWTGLSKPLXLQSREVPRHLCCRNPEWLFRIYQDTKVDIPSLIQTIRRVVKGRPGPRKQKWTVGLYPGKVREARCQASVHGASEARLTVSWQIPWNLKYLKVREVKYEVWLQEQGENTYVPYILALQNHTFXENIKPFTTYLVWVRCIFNKILLGPFCRCCLVLQX

SEQ ID NO: 303 - protein, 168 aa, Homo sapiens
  misc_feature (145): Xaa equals any of the naturally occurring L-amino acids
  misc_feature (164): Xaa equals any of the naturally occurring L-amino acids
  misc_feature (167): Xaa equals any of the naturally occurring L-amino acids
APGPSAACWHELLDKKVLNQEEMERVRCENATTMDKARALIDSIIRKGPQACQILIAFICAEDSFLAEKLELSGPPSGSQLNTDSEAAPLPAPASEDTVPGPHEPEEPPNTLKLCPHEEFVKLSKKKAAEIYPIKERNDRTRLAXIICNIEFDHLSAQEWGRNXTLXG

SEQ ID NO: 304 - protein, 193 aa, Homo sapiens
  misc_feature (133): Xaa equals any of the naturally occurring L-amino acids
  misc_feature (177): Xaa equals any of the naturally occurring L-amino acids
QGTVPYLGTFLTDLTMLDTALQDYIEGGLINFEKRRREFEVIAQIKLLQSACNSYCMTPDQKFIQWFQRQQLLTEEESYALSCEIEAAADASTTSPKPRKSMVKRLSLLFLGSDMITSPTPTKEQPKSTASGXLVKAWTLSACHPASRTTQRLRRATLLPWTPLMSLKKSSLSPPHXVLLSIPWTQIPQGCLP

SEQ ID NO: 305 - protein, 279 aa, Homo sapiens
  misc_feature (80): Xaa equals any of the naturally occurring L-amino acids
  misc_feature (269): Xaa equals any of the naturally occurring L-amino acids
FCVRSVSEAGVGESSAATEPIRVKQALATPSAPYGFALLNCGKNEMVIGWKPPKRRGGGKILGYFLDQHDSEELDWHAVXQQPIPTRVCKVSDLHEGHFYEFRARAANWAGVGELSAPSSLFECKEWTMPQPGPPYDVRASEVRATSLVLQWEPPLYMGAGPVTGYHVSFQEEGSEQWKPVTSGPISGTHLRVSDLQPGKSYVFQVQAMNSAGLGQPSMPTDPVLLEDKPGAHEIEVGVDEEGFIYLAFEAPEAPSPQSSVGPKEYKGXNGTPEGQDRR

SEQ ID NO: 306 - protein, 334 aa, Homo sapiens
HASERSREDLSALTRQGRYPPYERVVLREASFKRPVVILGPVADIAMQKLTAEMPDQFEIAETVSRTDSPSKIIKLDTVRVIAEKDKHALLDVTPSAIERLNYVQYYPIVVFFIPESRPALKALRQWLAPASRRSTRRLYAQAQKLRKHSSHLFTATIPLNGTSDTWYQELKAIIREQQTRPIWTAEDQLDGSLEDNLDLPHHGLADSSADLSCDSRVNSDYETDGEGGAYTDGEGYTDGEGGPYTDVDDEPPAPALARSSEPVQADESQSPRDRGRISAHQGAQVDSRHPQGQWRQDSMRTYEREALKKKFMRVHDAESSDEDGYDWGPATDL

SEQ ID NO: 307 - protein, 263 aa, Homo sapiens
RSNWSNFYSCRLLARAFTLRTVGFNHLTLGHNQRMEFLGDSIMQLVATEYLFIHFPDHHEGHLTLLRSSLVNNRTQAKVAEELGMQEYAITNDKTKRPVALRTKTLADLLESFIAALYIDKDLEYVHTFMNVCFFPRLKEFILNQDWNDPKSQLQQCCLTLRTEGKEPDIPLYKTLQTVGPSHARTYTVAVYFKGERIGCGKGPSIQQAEMGAAMDALEKYNFPQMAHQKRFIERKYRQELKEMRWEREHQEREPDETEDIKK

SEQ ID NO: 308 - protein, 250 aa, Homo sapiens
RPTRPLIPRSLQLPREVGSQPAAMSDINLDWVDRRQLQRLEEMLIVVDENDKVIGADTKRNCHLNENIEKGLLHRAFSVVLFNTKNRILIQQRSDTKVTFPGYFTDSCSSHPLYNPAELEEKDAIGVRRAAQRRLQAELGIPGEQISPEDIVFMTIYHHKAKSDRIWGEHEICYLLLVRKNVTLNPDPSETKSILYLSQEELWELLEREARGEVKVTPWLRTIAERFLYRWWPHLDDVTPFVELHKIHRV

SEQ ID NO: 309 - protein, 178 aa, Homo sapiens
  misc_feature (37): Xaa equals any of the naturally occurring L-amino acids
  misc_feature (39): Xaa equals any of the naturally occurring L-amino acids
  misc_feature (151): Xaa equals any of the naturally occurring L-amino acids
  misc_feature (168): Xaa equals any of the naturally occurring L-amino acids
  misc_feature (172): Xaa equals any of the naturally occurring L-amino acids
  misc_feature (175): Xaa equals any of the naturally occurring L-amino acids
EKQHGKPRAEEGEGPILSALIYCTSEGRALTRHAASXRXGMNIEVGNISYTGAIISWSSSEPCLEDYYHIMYRPNWNSIFSGYLRYSFHHEEKVPRTISSVVLEHLAPSTLYFLCISCKKAAFPYRHYCTMFHTLDKSPLAPGSSLGRPPXLSLGADGHSAGPASQAXWASXCFXILG

SEQ ID NO: 310 - protein, 116 aa, Homo sapiens
  misc_feature (7): Xaa equals any of the naturally occurring L-amino acids
  misc_feature (93): Xaa equals any of the naturally occurring L-amino acids
  misc_feature (104): Xaa equals any of the naturally occurring L-amino acids
RLRNSAXIMWNSSDANFSCYHESVLGYRYVAVSWGVVVAVTGTVGNVLTLLALAIQPKLRTRFNLLIANLTLADLLYCTLLQPFSVDTYLHLXWRTVPPSAGYXGSSFLPPILSPS

SEQ ID NO: 311 - protein, 186 aa, Homo sapiens
  misc_feature (6): Xaa equals any of the naturally occurring L-amino acids
  misc_feature (178): Xaa equals any of the naturally occurring L-amino acids
SKIAFXFRWWPAEICNPRSVPLNIQGLKHDLGDFPVFFFGSHDYYWVHQGRVFPYVEGDKSFAEGQTSINKTFKKALEEAAKRFQELKAQRESKEALEIEKNSRKPPPYKHIKANKVIGKVQIQVADLSEIPRCNCKPADENPCGLESECLNRMLQYECHPQCAQLEIVVRTSALQRXYTLMQRSS

SEQ ID NO: 312 - protein, 195 aa, Homo sapiens
LSTGPQLLLSSGRISGLSRASACTRSSTNSSADDILVYRMIPAESRSFLLTDLASGRTYDLCVLAVYEDSATGLTATRPVGCARFSTEPALRPCGAPHAPFLGGTMIIALGGVIVASVLVFIFVLLMRYKVHGGQPPGKAKIPAPVSSVCSQTNGALGPTPTPAPPAPEPAALRAHTVVQLDCEPWGPGHEPVGP

SEQ ID NO: 313 - protein, 390 aa, Homo sapiens
HERNVDPSPVGESKHRPGQSSAPAPPPRLNPSASSPNFFKYLKHNSSGEQSGNAVPKSISYRNALRKKLHSSSSVPNFLKFLAPVDENNTSDFMNTKRDFESKANHLGDSGGTPVKTRRHSWRQQIFLRVATPQKACDSSSRYEDYSELGELPPRSPLEPVCEDGPFGPPPEEKKRTSRELRELWQKAILQQILLLRMEKENQKLQASENDLLNKRLKLDYEEITPCLKEVTTVWEKMLSTPGRSKIKFDMEKMHSAVGQGVPRHHRGEIWKFLAEQFHLKHQFPSKQQPKDVPYKELLKQLTSQQHAILIDLGRTFPTHPYFSAQLGAGQLSLYNILKAYSLLDQEVGYCQGLSFVAGILLLHMSEEEAFKMLKFLMFDMGLRKQYRPD

SEQ ID NO: 314 - protein, 55 aa, Homo sapiens
AHLSARLSALILDEVAILPAPQNLSVLSTNMKHLLMWSPVIAPGETVYYSVEYQG

SEQ ID NO: 315 - protein, 343 aa, Homo sapiens
SEAHWISGSIGFLFLFLLLQLICILFTGRTFPTHPYFSAQLGAGQLSLYNILKAYSLLDQEVGYCQGLSFVAGILLLHMSEEEAFKMLKFLMFDMGLRKQYRPDMIILQIQMYQLSRLLHDYHRDLYNHLEEHEIGPSLYAAPWFLTMFASQFPLGFVARVFDMIFLQGTEVIFKVALSLLGSHKPLILQHENLETIVDFIKSTLPNLGLVQMEKTINQVFEMDIAKQLQAYEVEYHVLQEELIDSSPLSDNQRMDKLEKTNSSLRKQNLDLLEQLQVANGRIQSLEATIEKLLSSESKLKQAMLTLELERSALLQTVEELRRRSAEPSDREPECTQPEPTGD

SEQ ID NO: 316 - protein, 137 aa, Homo sapiens
LSLFGNLVIMVSISHFKQLHSPTNFLILSMATTDFLLGFVIMPYSIMRSVESCWYFGDGFCKFHTSFDMMLRLTSIFHLCSIAIDRFYAVCYPLHYTTKMTNSTIKQLLAFCWSVPALFSFGLGVFSLPPLCFQAHG

SEQ ID NO: 317 - protein, 250 aa, Homo sapiens
HEAAVSLRLGDLVWGKLGRYPPWPGKIVNPPKDLKKPRGKKCFFVKFFGTEDHAWIKVEQLKPYHAHKEEMIKINKGKRFQQAVDAVEEFLRRAKGKDQTSSHNSSDDKNRRNSSEERSRPNSGDEKRKLSLSEGKVKKNMGEGKKRVSSGSSERGSKSPLKRAQEQSPRKRGRPPKDEKDLTIPESSTVKGMMAGPMAAFKWQPTASEPVKDADPHFHHFLLSQTEKPAVCYQAITKKLKICEDLLLPR

SEQ ID NO: 318 - protein, 391 aa, Homo sapiens
  misc_feature (97): Xaa equals any of the naturally occurring L-amino acids
TRHEAVLMAEIGEDLDKSDVSSLIFLMKDYMGRGKISKEKSFLDLVVELEKLNLVAPDQLDLLEKCLKNIHRIDLKTKIQKYKQSVQGAGTSYRNVXQAAIQKSLKDPSNNFRLHNGRSKEQRLKEQLGAQQEPVKKSIQESEAFLPQSIPEERYKMKSKPLGICLIIDCIGNETELLRDTFTSLGYEVQKFLHLSMHGISQILGQFACMPEHRDYDSFVCVLVSRGGSQSVYGVDQTHSGLPLHHIRRMFMGDSCPYLAGKPKMFFIQNYVVSEGQLEDSSLLEVDGPAMKNVEFKAQKRGLCTVHREADFFWSLCTADMSLLEQSHSSPSLYLQCLSQKLRQERKRPLLDLHIELNGYMYDWNSRVSAKEKYYVWLQHTLRKKLILSYT

SEQ ID NO: 319 - protein, 269 aa, Homo sapiens
  misc_feature (101): Xaa equals any of the naturally occurring L-amino acids
  misc_feature (121): Xaa equals any of the naturally occurring L-amino acids
PPCQPFTRDLLIQTIENCGFQYQEFLLSPTSLGIPNSRLRYFLIAKLQSEPLPFQAPGQVLMEFPKIESVHPQKYAMDVENKIQEKNVEPNISFDGSIQCXGKDAILFKLETAEEIHRKNXQDSDLSVKMLKDFLEDDTDVNQYLLPPKSLLRYALLLDIVQPTCRRSVCFTKGYGSYIEGTGSVLQTAEDVQVENIYKSLTNLSQEEQITKLLILKLRYFTPKEIANLLGFPPEFGFPEKITVKQRYRLLGNSLNVHVVAKLIKILYE

SEQ ID NO: 320 - protein, 226 aa, Homo sapiens
QAPRGAPASPGDGHATPHTHSPLYSLGLPLHIHRPRRAGHLKAGGGAGAGRSRGVSLGGWRGQHVRGKCAPTLGVRREQPQVYSMRCVWLGGVCVTREGGVCEMSTRGMRGTCSCGGRVPESRGYPLSGCGPRSCRLGAGPLRRAPTQQAQKCLHKVQLRQELWGPGPGPVCACMAVCMRGPWRGTGGEVASHAHTHTQMGWAWPRLQALSLLGPGAECEWQCQPG

SEQ ID NO: 321 - protein, 173 aa, Homo sapiens
LAAAILVGQGVKSWIKDKVQEPRPFVIWLEKTHHIPVDEFYTLKRAERGNLVKEQLAEEKNIPQYLRSHWQKETGFAFPSGHTMFAASWALLAVGLLWPRRRTLTIAILLVWATGVMGSRLLLGMHWPRDLVVATLISWALVAVATWLAQRICGPLTPPAEENREIAQREQES

SEQ ID NO: 322 - protein, 254 aa, Homo sapiens
FLSESGIETMWKTLHQLAIPPRLYQICGWFIPWLAIASVVVLTVGWIWGFGFAPADYQQGNSYRIIYLHVPAAIWSMGIYASMAVAAFIGLVWQMKMANLAVAAMAPIGAVFTFIALVTGSAWGKPMWGTWWVWDARLTSELVLLFLYVGVIALWHAFDDRRLAGRAAGILVLIGVVNLPIIHYSVEWWNTLHQGSTRMQQSIDPAMRSPLRWSIFGFLLLSATLTLMRMRNLILLMEKRRPWVSELILKRGRK

SEQ ID NO: 323 - protein, 523 aa, Homo sapiens
TRPERSGLSWSNREKAKQAFKELLRDKAVPSNASWEQAMKMVVTDPRYSALPKLSEKKQAFNAYKAQREKEEKEEARLRAKEAKQTLQHFLEQHERMTSTTRYRRAEQTFGELEVWAVVPERDRKEVYDDVLFFLAKKEKEQAKQLRRRNIQALKSILDGMSSVNFQTTWSQAQQYLMDNPSFAQDHQLQNMDKEDALICFEEHIRALEREEEEERERARLRERRQQRKNREAFQTFLDELHETGQLHSMSTWMELYPAVSTDVRFANMLGQPGSTPLDLFKFYVEELKARFHDEKKIIKDILKDRGFCVEVNTAFEDFAHVISFDKRAAALDAGNIKLTFNSLLEKAEAREREREKEEARRMRRREAAFRSMLRQAVPALELGTAWEEVRERFVCDSAFEQITLESERIRLFREFLQVLEQTECQHLHTKGRKHGRKGKKHHHKRSHSPSGSESEEEELPPPSLRPPKRRRRNPSESGSEPSSSLDSVESGGAALGGRGSPSSHLLGADHGLRKAKKPKKKK

SEQ ID NO: 324 - protein, 230 aa, Homo sapiens
CLSQDTGQLFAHQPQLCVQLRNMAQETNHSQVPMLCSTGCGFYGNPRTNGMCSVCYKEHLQRQNSSNGRISPPATSVSSLSESLPVQCTDGSVPEAQSALDSTSSSMQPSPVSNQSLLSESVASSQLDSTSVDKAVPETEDVQASVSDTAQQPSEEQSKSLEKPKQKKNRCFMCRKKVGLTGFECRCGNVYCGVHRYSDVHNCSYNYKADAAEKIRKENPVVVGEKIQKI

SEQ ID NO: 325 - protein, 126 aa, Homo sapiens
  misc_feature (78): Xaa equals any of the naturally occurring L-amino acids
  misc_feature (100): Xaa equals any of the naturally occurring L-amino acids
  misc_feature (103): Xaa equals any of the naturally occurring L-amino acids
  misc_feature (109): Xaa equals any of the naturally occurring L-amino acids
QPLVQVAAWCIGEYGDLLLAGNCEEIEPLQVDEEEVLALLEKVLQSHMSLPATRGYALTALMKLSTRLCGDNNRIRQXVSIYGSCLDVELQQRAVEYDTXFRXYDHMRXAILEKMPLVERDGPQVD

SEQ ID NO: 326 - protein, 446 aa, Homo sapiens
QRECLSIHIGQAGIQIGDACWELYCLEHGIQPNGVVLDTQQDQLENAKMEHTNASFDTFFCETRAGKHVPRALFVDLEPTVIDGIRTGQHRSLFHPEQLLSGKEDAANNYARGRYSVGSEVIDLVLERTRKLAEQCGGLQGFLIFRSFGGGTGSGFTSLLMERLTGEYSRKTKLEFSVYPAPRISTAVVEPYNSVLTTHSTTEHTDCTFMVDNEAVYDICHRKLGVECPSHASINRLVVQVVSSITASLRFEGPLNVDLIEFQTNLVPYPRIHFPMTAFAPIVSADKAYHEQFSVSDITTACFESSNQLVKCDPRLGKYMACCLLYRGDVVPKEVNAAIAATKSRHSVQFVDWCPTGFKVGINNRPPTVMPGGDLAKVHRSICMLSNTTAIVEAWARLDHKFDLMYAKRAFLHWYLREGMEEAEFLEAREDLAALERDYEELAQSF

SEQ ID NO: 327 - protein, 101 aa, Homo sapiens
RKYFEELQPGDSLLTPRRTMTEADIVNFACLSGDHFYAHMDKIAAAESIFGERVVHGYFVLSAAAGLFVDAGVGPVIANYGLESLRFIEPVKPGADRRRQE

SEQ ID NO: 328 - protein, 203 aa, Homo sapiens
LISAMAIAASFMRACHVCPLKKPAGCCKEQTMNIVDQQTFRDAMSCMGAAVNIITTDGPAGRAGFTASAVCSVTDTPPTLLVCLNRGASVWPAFNENRTLCVNTLSAGQEPLSNLFGGKTPMEHRFAAARWQTGVTGCPQLEEALVSFDCRISQVVSVGTHDILFCAIEAIHRHTTPYGLVWFDRSYHARYVPFRICGKFART

SEQ ID NO: 329 - protein, 233 aa, Homo sapiens
GLASSRSRRRTTMTQSVVVQVGQCGNQIGCCFWDLALREHAAVNQKGIYDEAISSFFRNVDTRVVGDGGSISKGKICSLKARAVLIDMEEGVVNEILQGPLRDVFDTKQLITDISGSGNNWAVGHKVFGSLYQDQILEKFRKSAEHCDCLQCFFIIHSMGGGTGSGLGTFLLKVLEDEFPEVYRFVTSIYPSGEDDVITSPYNSILAMKELNEHADCVLPIDNQVRNDIGTYE

SEQ ID NO: 330 - protein, 304 aa, Homo sapiens
GTSGRGLASSRSRRRTTMTQSVVVQVGQCGNQIGCCFWDLALREHAAVNQKGIYDEAISSFFRNVDTRVVGDGGSISKGKICSLKARAVLIDMEEGVVNEILQGPLRDVFDTKQLITDISGSGNNWAVGHKVFGSLYQDQILEKFRKSAEHCDCLQCFFIIHSMGGGTGSGLGTFLLKVLEDEFPEVYRFVTSIYPSGEDDVITSPYNSILAMKELNEHADCVLPIDNQSLFDIISKIDLMVNSGKLGTTVKPKSLVTSSSGALKKQHKKPFDAMNNIVANLLLNLTSSARLKGPLIWTLMKSA

SEQ ID NO: 331 - protein, 144 aa, Homo sapiens
  misc_feature (2): Xaa equals any of the naturally occurring L-amino acids
  misc_feature (109): Xaa equals any of the naturally occurring L-amino acids
  misc_feature (127): Xaa equals any of the naturally occurring L-amino acids
KXETPSNPVATVKAGERQWCDVGIFKNNTALVSQFYLLPKGKQSISKVGNADVPDYSLLKKQDLVPGTGYRFRVAAINGCGIGPFSKISEFKTCIPGFPGAPSAVRISXNVEGIHLSWEPPTSPSGXYFGIFSLLGYPHSTDTR

SEQ ID NO: 332 - protein, 99 aa, Homo sapiens
  misc_feature (85): Xaa equals any of the naturally occurring L-amino acids
  misc_feature (91): Xaa equals any of the naturally occurring L-amino acids
IRHEGLLPGTSDPGTARRRTALPPAAEPSLLAMSQSSTAPRPRRWSARTVGPSGEGTSKKLAKHRAAEAAINILKANASICFAVXDPLMPXPSKHQRTS

SEQ ID NO: 333 - protein, 166 aa, Homo sapiens
TQVSIPSRKIWLRRLTRPRGPCCVAQDVAFMEILGQMECVQFATKNIFRGSKIMTEMSISREDKITTPKTEVSEPVVTQPSPSVSQPSTSQSEEKAPELPKPKKNRCFMCRKKVGLTGFDCRCGNLFCGLHRYSDKHNCPYDYKAEAAAKIRKENPVVVAEKIQRI

SEQ ID NO: 334 - protein, 719 aa, Homo sapiens
TSWSDSDLFSRDQKSLLPPPNQSQLLEEFLDNFKKNTANDFSNVPDITTGLKRSQTDGTLDQVSHREKMEQTFRSAEQITALCRSFNDSQANGMEGPRENQDPPPRPLARHLSDADRLRKVIQELVDTEKSYVKDLSCLFELYLEPLQNETFLTQDEMESLFGSLPEMLEFQKVFLETLEDGISASSDFNTLETPSQFRKLLFSLGGSFLYYADHFKLYSGFCANHIKVQKVLERAKTDKAFKAFLDARNPTKQHSSTLESYLIKPVQRVLKYPLLLKELVSLTDQESEEHYHLTEALKAMEKVASHINEMQKIYEDYGTVFDQLVAEQSGTEKEVTELSMGELLMHSTVSWLNPFLSLGKARKDLELTVFVFKRAVILVYKENCKLKKKLPSNSRPAHNSTDLDPFKFRWLIPISALQVRLGNPAGTENNSIWELIHTKSEIEGRPETIFQLCCSDSESKTNIVKVIRSILRENFRRHIKCELPLEKTCKDRLVPLKNRVPVSAKLASSRSLKVLKNSSSNEWTGETGKGTLLDSDEGSLSSGTQSSGCPTAEGRQDSKSTSPGKYPHPGLADFADNLIKESDILSDEDDDHRQTVKQGSPTKDIEIQFQRLRISEDPDVHPEAEQQPGPESGEGQKGGEQPKLVRGHFCPIKRKANSTKRDRGTLLKAQIRHQSLDSQSENATIDLNSVLEREFSVQSLTSVVSEECFYETESHGKS

SEQ ID NO: 335 - protein, 101 aa, Homo sapiens
GFPAPRAPPPGSASRGRSRGRKMPAVSKGDGMRGLAVFISDIRNCKSKEAEIKRINKELANIRSKFKGDKALDGYSKKKYVCNCSSSFSLVMTLTLDTWRL

SEQ ID NO: 336 - protein, 149 aa, Homo sapiens
  misc_feature (60): Xaa equals any of the naturally occurring L-amino acids
  misc_feature (88): Xaa equals any of the naturally occurring L-amino acids
ESGGSPAEAGEQPTMEPQKIMPPSKPHPPVVGKVTHHSIELYWDLEKKAKRQGPQEQWFXFSIEEEDPKMHTYGIIYTGYATKHVVEXLEPRTLYRFRLKVTSPSGECEYSPLVSVSTTREPISSEHLQRAVSVNDEDLLVRILQRRPC

SEQ ID NO: 337 - protein, 299 aa, Homo sapiens
GTRRNSIQIYLLNVAIADLLLIFCLPFRIMYHINQNKWTLGVILCKVVGTLFYMNMYISIILLGFISLDRYIKINRSIQQRKAITTKQSIYVCCIVWMLALGGFLTMIILTLKKGGHNSTMCFHYRDKHNAKGEAIFNFILVVMFWLIFLLIILSYIKIGKNLLRISKRRSKFPNSGKYATTARNSFIVLIIFTICFVPYHAFRFIYISSQLNVSSCYWKEIVHKTNEIMLVLSSFNSCLDPVMYFLMSSNIRKIMCQLLFRRFQGEPSRSESTSEFKPGYSLHDTSVAVKIQSSSKST

SEQ ID NO: 338 - protein, 120 aa, Homo sapiens
  misc_feature (54): Xaa equals any of the naturally occurring L-amino acids
  misc_feature (62): Xaa equals any of the naturally occurring L-amino acids
  misc_feature (111): Xaa equals any of the naturally occurring L-amino acids
  misc_feature (117): Xaa equals any of the naturally occurring L-amino acids
TAVIENTAGQGSNLGFKFEHLAAIIDGVEDKSRVGVCIDTCHVSLPGMICVLQXNARKHSRXLPVLSALSICAGCTLTMRKAPLAAALTAIIASVKAISVMNAFRGIMQDXPFRRAXPLI

SEQ ID NO: 339 - protein, 223 aa, Homo sapiens
  misc_feature (24): Xaa equals any of the naturally occurring L-amino acids
PQDSLYQELLQTTRWFIQLFLHHXAQAPLRGTVMQAPAVRQVNPQNSVTVRVPQTTTYVVNNGLTLGSTGPQLTVHHRPPQVHTEPPRPVHPAPLPEAPQPQRLPPEAASTSLPQKPHLKLARVQSQNGIVLSWSVLEVDRSCATVDSYHLYAYHEEPSATVPSQWKKIGEVKALPLPMACTLTQFVSGSKYYFAVRAKDIYGRFGPFCDPQSTDVISSTQSS

SEQ ID NO: 340 - protein, 183 aa, Homo sapiens
  misc_feature (172): Xaa equals any of the naturally occurring L-amino acids
  misc_feature (178): Xaa equals any of the naturally occurring L-amino acids
PASVNAGQVVTGNLAPHFLALCKPNYTALGCQQYTQFISGEEACTGNPDLIMRARKTFPSKEAALSVYAAMYLTMYITNTIKAKGTRLAKPVLCLGLMCLAFLTGLNRVAEYRNHWSDVIAGFLVGISIAVFLVVCVVNNFKGRQAENEHIHMDNLAQMPMISIPRVESPLXKNPITXFAEVT

SEQ ID NO: 341 - protein, 293 aa, Homo sapiens
  misc_feature (47): Xaa equals any of the naturally occurring L-amino acids
VCQDGGLPHHRAGANRQFTLAKKQWDSVVLERIEQACDPAWSADVAXVVMQEGLAHICLVTPSMTLTRAKVEVNIPRKRKGNCSQHDRALERFYEQVVQAIQRHIHFDVVKCILVASPGFVREQFCDYMFQQAVKTDNKLLLENRSKFLQVHASSGHKYSLKEALCDPTVASRLSDTKAAGEVKALDDFYKMLQHEPDRAFYGLKQVEKANEAMAIDTLLISDELFRHQDVATRSRYVRLVDSVKENAGTVRIFSSLHVSGEQLSQLTGVAAILRFPVPELSDQEGDSSSEED

SEQ ID NO: 342 - protein, 402 aa, Homo sapiens
  misc_feature (5): Xaa equals any of the naturally occurring L-amino acids
  misc_feature (9): Xaa equals any of the naturally occurring L-amino acids
  misc_feature (12): Xaa equals any of the naturally occurring L-amino acids
  misc_feature (18): Xaa equals any of the naturally occurring L-amino acids
  misc_feature (21): Xaa equals any of the naturally occurring L-amino acids
  misc_feature (22): Xaa equals any of the naturally occurring L-amino acids
  misc_feature (25): Xaa equals any of the naturally occurring L-amino acids
  misc_feature (61): Xaa equals any of the naturally occurring L-amino acids
  misc_feature (83): Xaa equals any of the naturally occurring L-amino acids
  misc_feature (262): Xaa equals any of the naturally occurring L-amino acids
RISTXNELXQEXPNSSSXQKXXEHXSSKQFFKDWRDKDQSDGFGKVYVTEKVAQIKQIPFXASKLHSSPQMAAQHNMVDDGSXKVEIWRVENNGRIQVDQNSYGEFYGGDCYIILYTYPRGQIIYTWQGANATRDELTTSAFLTVQLDRSLGGQAVQIRVSQGKEPVHLLSLFKDKPLIIYKNGTSKKGGQAPAPPTRLFQVRRNLASITRIVEVDVDANSLNSNDVFVLKLPQNSGYIWVGKGASQEEEKGAEYVASVLKXKTLRIQEGEEPEEFWNSLGGKKDYQTSPLLETQAEDHPPRLYGCSNKTGRFVIEEIPGEFTQDDLAEDDVMLLDAWEQIFIWIGKDANEVEKKESLKSAKMYLETDPSGRDKRTPIVIIKQGHEPPTFTGWFLGWDSSKW

SEQ ID NO: 343 - protein, 218 aa, Homo sapiens
PRVRPRVRRNMAQETNHSQVPMLCSTGCGFYGNPRTNGMCSVCYKEHLQRQNSSNGRISPPATSVSSLSESLPVQCTDGSVPEAQSALDSTSSSMQPSPVSNQSLLSESVASSQLDSTSVDKAVPETEDVQASVSDTAQQPSEEQSKSLEKPKQKKNRCFMCRKKVGLTGFECRCGNVYCGVHRYSDVHNCSYNYKADAAEKIRKENPVVVGEKIQKI

SEQ ID NO: 344 - protein, 163 aa, Homo sapiens
AVPVSNAACRPRVLFEGAIHGGGLAQVLPGREPSARGWPALKVMHNAGDQKGGDGRPCQEASQHVRPVVSVLGHADHAHQEGRAQQGQAERGFDQAGALHAEHESHVHRCVGDRVGAEGRILQGKARRAAATRLGLPAQAPWSVTKRSGPGRSGEGGRQPRAV

SEQ ID NO: 345 - protein, 234 aa, Homo sapiens
LIVNLALVDLGLALTLPFWAAESALDFHWPFGGALCKMVLTATVLNVYASIFLITALSVARYWVVAMAAGPGTHLSLFWARIATLAVWAAAALVTVPTAVFGVEGEVCGVRLCLLRFPSRYWLGAYQLQRVVLAFMVPLGVITTSYLLLLAFLQRQQRRRQDSRVVARSVRILVASFFLCWFPNHVVTLWGVLVKFDLVPWNSTFYTIQTYVFPVTTCLAHSNSCLNPIVYVLS

SEQ ID NO: 346 - protein, 152 aa, Homo sapiens
  misc_feature (151): Xaa equals any of the naturally occurring L-amino acids
HASPGALRAGAMARELYHEEFPRAGKQAGLQVWRIEKLELVPVPQSAHGDFYVGDAYLVLHTAKTSRGFTYRLHFWLGKECSQDESTAAAIFTVQMDDYLGGKPVQNRELQGYESNDFVSYFKGGLKYKAGSVASGLNHVSYERLTAKRFXH

SEQ ID NO: 347 - protein, 401 aa, Homo sapiens
  misc_feature (20): Xaa equals any of the naturally occurring L-amino acids
  misc_feature (21): Xaa equals any of the naturally occurring L-amino acids
  misc_feature (93): Xaa equals any of the naturally occurring L-amino acids
  misc_feature (95): Xaa equals any of the naturally occurring L-amino acids
  misc_feature (394): Xaa equals any of the naturally occurring L-amino acids
  misc_feature (399): Xaa equals any of the naturally occurring L-amino acids
  misc_feature (401): Xaa equals any of the naturally occurring L-amino acids
QLLEGYARYSVSVFQPPFQXXRMALESQSPGCTTLLSTGSLEAGDSERDPIQPPELQLVTPMAEGDTGLPRVWAAPDRGPVPSTSGISSEMLXSXPIEVGSLPAGERVSRPEAAVPGYQHPSEAMNAHTPQFFIYKIDSSNREQRLEDKGDTPLELGDDCSLALVWRNNERLQEFVLVASKELECAEDPGSAGEAARAGHFTLDQCLNLFTRPEVLAPEEAWYCPQCKQHREASKQLLLWRLPNVLIVQLKRFSFRSFIWRDKINDLVEFPVRNLDLSKFCIGQKEEQLPSYDLYAVINHYGGMIGGHYTACARLPNDRSSQRSDVGWRLFDDSTVTTVDESQVVTRYAYVLFYRRRNSPVERPPRAGHSEHHPDLGPAAEAAASQGLGPGQAXTNPQXFX

SEQ ID NO: 348 - protein, 374 aa, Homo sapiens
SERLRLGGGSNGGGGRLRAPGLRRSSSCPSSHIEGRKDNFGEKMASNNHWFQSSQVPSFAQMLKKNLPVQPATKTITTPTGWSSESYGLSKMASKVTQVTGNFPEPLLSKNLSSISNPVLPPKKIPKEFIMKYKRGEINPVSALHQFAQMQRVQLDLKETVTTGNVMGPYFAFCAVVDGIQYKTGLGQNKKESRSNAAKLALDELLQLDEPEPRILETSGPPPFPAEPVVLSELAYVSKVHYEGRHIQYAKISQIVKERFNQLISNRSEYLKYSSSLAAFIIERAGQHEVVAIGTGEYNYSQDIKPDGRVLHDTHAVVTARRSLLSKNPAMMEKSIFCTEPTSNLLTLKQNINICLYMNQLPKGSAQIKSQLPS

SEQ ID NO: 349 - protein, 172 aa, Homo sapiens
  misc_feature (23): Xaa equals any of the naturally occurring L-amino acids
  misc_feature (120): Xaa equals any of the naturally occurring L-amino acids
IIEKLAEGLDIQLKSPVQCIDYXGDEVQVTTTDGTGYSAQKVLVTVPLALLQKGAIQFNPPLSEKKMKAINSLGAGIIEKIALQFPYRFWDSKVQGADFFGHVPPSASKRGLFAVFYDMXPQKKHSVLMSVIAGEAVASVRTLDDKQVLQQCMATVRELFQGAGGPRSHKVF

SEQ ID NO: 350 - protein, 147 aa, Homo sapiens
MTLEEKSEFKQRVRKELEVNGIEFYPQKEFDEDLEDKTENDKIRQESMPFAVVGSDKEYQVNGKRVLGRKTPWGIIEVENLNHCEFALLRDFVIRTHLQDLKEVTHNIHYETYRAKRLNDNGGLPPGEGLLGTVLPPVPATPCPTAE

SEQ ID NO: 351 - protein, 239 aa, Homo sapiens
YFGCLRCPPAETQLLRRPAVFVGSAASGIRSGLWSASSGHWCAPAAGRAHAPVPRLVRGLGAASTAAPQDAQTGPQPMPRADCIMRHLPYFCRGQVVRGFGRGSKQLGIPTANFPEQVVDNLPADISTGIYYGWASVGSGDVHKMVVSIGWNPYYKNTKKSMETHIMHTFKEDFYGEILNVAIVGYLRPEKNFDSLESLISAIQGDIEEAKKRLELPEHLKIKEDNFFQVSKSKIMNGH

SEQ ID NO: 352 - protein, 177 aa, Homo sapiens
  misc_feature (9): Xaa equals any of the naturally occurring L-amino acids
  misc_feature (133): Xaa equals any of the naturally occurring L-amino acids
KRLLRHLQXLRVSSIGKLHLCLFGEGGVNCAICWKTPFKNAWLKRLREGMPECVAAPKVRSSGSIEPSPSITLNYPRQSFDTAHFPVEEKAAIAQLRQFCQNGAGEYEQQRDFPAVEGTSRLSASLATGGLSXRQCLHRLLAEQRQAWDGGAGSVWLNELDLADFYRHLITYSPLVV

SEQ ID NO: 353 - protein, 208 aa, Homo sapiens
TWSGRRRVGPPALKCTETPHPRAGEESHTCNWVFLKPAGDQAESARQLPPGHCEAGNSCPHQPLGEAGAPGLVPPWDPSMRAAGEAGATGPVPPWNPSARGSSSQQPASHESRLPREPGQPCAEWWEEIHSAGGAAGLRAIPSLDTLPVPGGPHTRPTTVPSGLCTQPARRLTGSPNRDRKLQDSRCALIVGDLVREPVTFQTGLRAP

SEQ ID NO: 354 - protein, 272 aa, Homo sapiens
  misc_feature (74): Xaa equals any of the naturally occurring L-amino acids
  misc_feature (228): Xaa equals any of the naturally occurring L-amino acids
  misc_feature (234): Xaa equals any of the naturally occurring L-amino acids
  misc_feature (237): Xaa equals any of the naturally occurring L-amino acids
  misc_feature (266): Xaa equals any of the naturally occurring L-amino acids
PTPSTGLTRVTARPRPPWLRSCSCTLPAEQAFWCLVQICDKYLPGYYSAGLEAIQLDGEIFFALLRRASPLAHXHLRRQRIDPVLYMTEWFMCIFARTLPWASVLRVWDMFFCEGVKIIFRVALVLLRHTLGSVEKLRSCQGMYETMEQLRNLPQQCMQEDFLVHEVTNLPVTEALIERENAAQLKKWRETRGELQYRPSRRLHGSRAIHEERRRQQPPLGPSSSLLXLPGLKXRAXGSWRGPVPAAPVRRASAGPAPRPVGHLLXGLHPSL

SEQ ID NO: 355 - protein, 148 aa, Homo sapiens
  misc_feature (10): Xaa equals any of the naturally occurring L-amino acids
  misc_feature (140): Xaa equals any of the naturally occurring L-amino acids
  misc_feature (146): Xaa equals any of the naturally occurring L-amino acids
AIGGHNQIPXAQAGFYHQPASSGDDRAMCFTCSVCLVCWEPTDEPWSEHERHSPNCPFVKGEHTQNVPLSVTLATSPAQFPCTDGTDRISCFGSGSCPHFLAAATKRGKICIWDVSKLMKVHLKFEINAYDPAIVQQLIXSGDPSXRS

SEQ ID NO: 356 - protein, 386 aa, Homo sapiens
  misc_feature (127): Xaa equals any of the naturally occurring L-amino acids
EQNIGDIFLKYSKDLVKTYPPFVNFFEMSKETIIKCEKQKPRFHAFLKINQAKPECGRQSLVELLIRPVQRLPSVALLLNDLKKHTADENPDKSTLEKAIGSLKEVMTHINEDKRKTEAQKQIFDVXYEVDGCPANLLSSHRSLVQRVETISLGEHPCDRGEQVTLFLFNDCLEIARKRHKVIGTFRSPHGQTRPPASLKHIHLMPLSQIKKVLDIRETEDCHNAFALLVRPPTEQANVLLSFQMTSDELPKENWLKMLCRHVANTICKADAENLIYTADPESFEVNTKDMDSTLSRASRAIKKTSKKVTRAFSFSKTPKRALRRALMTSHGSVEGRSPSSNDKHVMSRLSSTSSLAGIPSPSLVSLPSFFERRSHTLSRSTTHLI

SEQ ID NO: 357 - protein, 465 aa, Homo sapiens
  misc_feature (124): Xaa equals any of the naturally occurring L-amino acids
  misc_feature (157): Xaa equals any of the naturally occurring L-amino acids
  misc_feature (168): Xaa equals any of the naturally occurring L-amino acids
  misc_feature (177): Xaa equals any of the naturally occurring L-amino acids
  misc_feature (213): Xaa equals any of the naturally occurring L-amino acids
YVKGFDNAMELVKNMTERIPQFKSVVEEIQKQKICGSLTLQHHMLEPVQRIPRYEMLLKDYLRKLPPDSLDWNDAKKSLEIISTAASHSNSAIRKMENLKKLLEIYEMLGEEEDIVNPSNELIXEGQILKLAARNTSAQERYLFLFNNMLLYCVPKXSLVGSKFTVRXRVGIDGMKXVETQNEEYPHTFQVSGKERTLELQASSAQDKEEWIXALQETIDAFHQRHETFRNAIAKDNDIHSEVSTAELGKRAPRWIRDNEVTMCMKCKEPFNALTRRRHHCRACGYVVCWKCSDYKAQLEYDGGKLSKVCKDCYQIISGFTDSEEKKRKGILEIESAEVSGNSVVCSFLQYMEKSKPWQKAWCVIPKQDPLVLYMYGAPQDVRAQATIPLLGYVVDEMPRSADLPHSFKLTQSKSVHSFAADSEELKQKWLKVILLAVTGETPGGPNEHPATLDDHPEPKKKSEC

SEQ ID NO: 358 - protein, 332 aa, Homo sapiens
  misc_feature (174): Xaa equals any of the naturally occurring L-amino acids
  misc_feature (179): Xaa equals any of the naturally occurring L-amino acids
  misc_feature (194): Xaa equals any of the naturally occurring L-amino acids
  misc_feature (196): Xaa equals any of the naturally occurring L-amino acids
  misc_feature (200): Xaa equals any of the naturally occurring L-amino acids
  misc_feature (254): Xaa equals any of the naturally occurring L-amino acids
  misc_feature (324): Xaa equals any of the naturally occurring L-amino acids
TCWARKRFSRKPSTVCKLLPANPRPQHGARRLCPPTLSILLRKAGGIRKPLASLHLSPVSSALRMESGRGSSTPPGPIAALGMPDTGPGSSSLGKLQALPVGPRAHCGDPVSLAAAGDGSPDIGPTGELSGSLKIPNRDSGIDSPSSSVAGENFPCEEGLEAGPSPTVLGAHAXMALDXQVPKVTPQEEADSDXGXEPDXENTPQKADKDAGLAQHSGPQKLLHIAQELLHTEETYVKRLHLLDQVFCTRLTDXGIPPEVIMGIFSNISSIHRFHGQFLLPELKTRITEEWDTNPRASGTSCRSWPHFLKMYRRVCSRTLTEPXGWVKHVDP

SEQ ID NO: 359 - protein, 161 aa, Homo sapiens
ARGLKARYQTMSILPMELYKEFAEYVTNHYRMLCAVLEPALNVKGKEEVASALVHILQSTGKAKDFLSDMAMSEVDRFMEREHLIFRENTLATKAIEEYMRLIGQKYLKDAIGEFIRALYESEENCEVDPIKCTASSLAEHQANLRMCCELALCKVVNSHW

SEQ ID NO: 360 - protein, 503 aa, Homo sapiens
RESERQLRLRLCVLNEILGTERDYVGTLRFLQSAFLHRIRQNVADSVEKGLTEENVKVLFSNIEDILEVHKDFLAALEYCLHPEPQSQHELGNVFLKFKDKFCVYEEYCSNHEKALRLLVELNKIPTVRAFLLSCMLLGGRKTTDIPLEGYLLSPIQRICKYPLLLKELAKRTPGKHPDHPAVQSALQAMKTVCSNINETKRQMEKLEALEQLQSHIEGWEGSNLTDICTQLLLQGTLLKISAGNIQERAFFLFDNLLVYCKRKSRVTGSKKSTKRTKSINGSLYIFRGRINTEVMEVENVEDGTADYHSNGYTVTNGWKIHNTAKNKWFVCMAKTAEEKQKWLDAIIREREQRESLKLGMERDAYVMIAEKGEKLYHMMMNKKVNLIKDRRRKLSTVPKCFLGNEFVAWLLEIGEISKTEEGVNLGQALLENGIIHHVSDKHQFKNEQVMYRFRYDDGTYKARSELEDIMSKGVRLYCRLHSLYTPVIKDRDYHLKTYKSVL

SEQ ID NO: 361 - protein, 93 aa, Homo sapiens
  misc_feature (41): Xaa equals any of the naturally occurring L-amino acids
  misc_feature (76): Xaa equals any of the naturally occurring L-amino acids
  misc_feature (82): Xaa equals any of the naturally occurring L-amino acids
PRPLELTIPTDLCCAPSSLALLRELSLSPPAALWLQERQAXLRHSLPLQSFLLKPVQRILKYHLLLQELGKHLGGXPKALGXRQMVGGNYCVH

SEQ ID NO: 362 - protein, 458 aa, Homo sapiens
  misc_feature (304): Xaa equals any of the naturally occurring L-amino acids
  misc_feature (308): Xaa equals any of the naturally occurring L-amino acids
  misc_feature (377): Xaa equals any of the naturally occurring L-amino acids
DHLYLGSEWNASNLEELQGSGVDYILNVTREIDNFFPGLFAYHNIRVYDEETTDLLAHWNEAYHFINKAKRNHSKCLVHCKMGVSRSASTVIAYAMKEFGWPLEKAYNYVKQKRSITRPNAGFMRQLSEYEGILDASKQRHNKLWRQQTDSSLQQPVDDPAGPGDFLPETPDGTPESQLPFLDDAAQPGLGPPLPCCFRRLSDPLLPSPEDETGSLVHLEDPEREALLEEAAPPAEVHRPARQPQQGSGLCEKDVKKKLEFGSPKGRSGSLLQVEETEREEGLGAGRWGQLPTQLDQNLLNSEXLNNXSKRSCPNGMEDDAIFGILNKVKPSYKSCADCMYPTASGAPEASRERCEDPNAPAICTQPAFLPHITSSXVAHLASRSRVPEKPASGPTEPPPFLPPAGSRRADTSGPGAGAALEPPASLLGTFQRDPKILAKVLLLKNLMWIRTFPAQNG

SEQ ID NO: 363 - protein, 177 aa, Homo sapiens
  misc_feature (125): Xaa equals any of the naturally occurring L-amino acids
ALIRLTIGKAGTPAGTGPEFPGRPTRPHMLVQGLEPNTKYEFAVRLHVDQLSSPWSPVVYHSTLPEAPAGPPVGVKVTLIEDDTALVSWKPPDGPETVVTRYTILYASRKAWIAGEWQVLHREGXITMALLENLVAGNVYIVKISASNEVGEGPFSNSVELAVLPKETSESNQSPSV

SEQ ID NO: 364 - protein, 209 aa, Homo sapiens
  misc_feature (209): Xaa equals any of the naturally occurring L-amino acids
GIFSYIIQEYLCTVQTTLESLSAVADIIVRGPPGPPEDVQVEDISSTTSQLSWRAGPDNNSPIQIFTIQTRTPFSVGWQAVATVPEILNGKTYNATVVGLSPWVEYEFRVVAGNSIGIGEPSEPSELLRTKASVPVVAPVNIHGGGGSRSELVITWESIPEELQNGEGFGYIIMFRPVGSTTWSKEKVSSVESSRFVYRNESIIPLSPX

SEQ ID NO: 365 - protein, 309 aa, Homo sapiens
  misc_feature (254): Xaa equals any of the naturally occurring L-amino acids
  misc_feature (292): Xaa equals any of the naturally occurring L-amino acids
IINVTKSDAGSYTCIATNHFGTASSTGNLVVKDPTRVMVPPSSMDVTVGESIVLPCQVTHDHSLDIVFTWSFNGHLIDFDRDGDHFERVGGQDSAGDLMIRNIQLKHAGKYVCMVQTSVDRLSAAADLIVRGPPGPPEAVTIDEITDTTAQLSWRPGPDNHSPITMYVIQARTPFSVGWQAVSTVPELIDGKTFTATVVGLNPWVEYEFRTVAANVIGIGEPSRPSEKRRTEEALPEVTPANVSGGGGSKSELXITWETVPEELQNGRGFGYVVAFRPYGKMIWMLTVLASXDASRYVFRNESVHPSLL

SEQ ID NO: 366 - protein, 76 aa, Homo sapiens
  misc_feature (76): Xaa equals any of the naturally occurring L-amino acids
HYRRYACRYRSGIPGSTHASEVIMTAYNIIGESPASAPVEVFVGEAAPAMAPQNVQVTPLTASQLEVTWDPPPPEX

SEQ ID NO: 367 - protein, 332 aa, Homo sapiens
LVPNRHEKECEHCDCLQGFQLTHSLGGGTGSGMGTLLISKIREEFPDRIMNTFSVMPSPKVSDTVVEPYNATLSVHQLVENTDETYCIDNEALYDICFRTLKLTTPTYGDLNHLVSATMSGVTTSLRFPGQLNADLRKLAVNMVPFPRLHFFMPGFAPLTSRGSQQYRALTVPELTQQMFDARNMMAACDPRHGRYLTVATVFRGPMSMKEVDEQMLAIQSKNSSYFVEWIPNNVKVAVCDIPPRGLKMASTFIGNSTAIQELFKRISEQFSAMFRRKAFLHWFTGEGMDEMEFTEAESNMNDLVSEYQQYQDATANDGEEAFEDEEEEIDG

SEQ ID NO: 368 - protein, 248 aa, Homo sapiens
RRPPGPPFGWRPPMLSATRRACQLLLLHSLFPVPRMGNSASNIVSPQEALPGRKEQTPVAAKHHVNGNRTVEPFPEGTQMAVFGMGCFWGAERKFWVLKGVYSTQVGFAGGYTSNPTYKEVCSEKTGHAEVVRVVYQPEHMSFEELLKVFWENHDPTQGMRQGNDHGTQYRSAIYPTSAKQMEAALSSKENYQKVLSEHGFGPITTDIREGQTFYYAEDYHQQYLSKNPNGYCGLGGTGVSCPVGIKK

SEQ ID NO: 369 - protein, 65 aa, Homo sapiens
GEPHREKSQLCLVNELVCFSKIQLEYRLLCEQGPAHCKVNIVHTACAFITHLECSLFFILLKVVL

SEQ ID NO: 370 - protein, 335 aa, Homo sapiens
APSGSGPRSPALTTSSPRASCGLWSCWRRASLPRHPARETCPLHSLGPGLSPPRGPEIEPRGEGDHNHDTGEGGQGGEEPRGGRWDEDEQWSVVVECEDCELIPADHVIVTVSLGVLKRQYTSFFRPGLPTEKVAAIHRLGIGTTDKIFLEFEEPFWGPECNSLQFVWEDEAESHTLTYPPELWYRKICGFDVLYPPERYGHVLSGWICGEEALVMEKCDDEAVAEICTEMLRQFTGNPNIPKPRRILRSAWGSNPYFRGSYSYTQVGSSGADVEKLAKPLPYTESSKTAPMQVLFSGEATHRKYYSTTHGALLSGQREAARLIEMYRDLFQQGT

SEQ ID NO: 371 - protein, 277 aa, Homo sapiens
GKFDELDMSPGDPKWLDVIERDLHRQFPFHEMFVSRGGHGQQDLFRVLKAYTLYRPEEGYCQAQAPIAAVLLMHMPAEQAFWCLVQICEKYLPGYYSEKLEAIQLDGEILFSLLQKVSPVAHKHLSRQKIDPLLYMTEWFMCAFSRTLPWSSVLRVWDMFFCEGVKIIFRVGLVLLKHALGSPEKVKACQGQYETIERLRSLSPKIMQEAFLVQEVVELPVTERQIEREHLIQLRRWQETRGELQCRSPPGCMVPRLSWMQNLVPGCPTTLPSIRCP

SEQ ID NO: 372 - protein, 124 aa, Homo sapiens
  misc_feature (56): Xaa equals any of the naturally occurring L-amino acids
ITRNTRNKGACSSRRSVSPWRTEFIICVLSLGSLAFADACTSSSVTPKMFVHFLSXNHMISLVGCMIQFYIFASGANTGSFLLVVMAYDCYMAICNPLLYPLVMSNTFCIQLSGVSFIIVFFIL

SEQ ID NO: 373 - protein, 176 aa, Homo sapiens
  misc_feature (133): Xaa equals any of the naturally occurring L-amino acids
AQIYSVAIFLGINLAAFIIIVFSYGSMFYSVHQSAITATEIRNQVKKEMILAKRFFFIVFTDALCWIPIFVVKFLSLLQVEIPGTITSWVVIFILPINSALNPILYTLTTRPFKEMIHRFWYNYRQRKSMDSXGQKTYAPSFIWVEMWPLQEMPPELMKPDLFTYPCEMSLISQST

SEQ ID NO: 374 - protein, 309 aa, Homo sapiens
NLSEEMTVPAYPRHGWNRVGWAQLEPRPGLLHLRGPQTEEAVGLPPSRQQSPVRRGVKRAMCGFPRKQDLELGAGAVCREGLSQQVQVAPSTAHGHVAVGPPSVRGAVPARPQDALGRGEPWVSCHSPEHLGETQKYFFIRQSLHELRLKSGMNPQRTWTDAKAGRTTKPMSFRNQASCSSGAASSRGDVSSHTSWISWQSGSQKGSSNSRKILLLVPKPIFLIASAFSAGRGGSKKVSKCSLRKPKGTVTMTWCAGNRSPSSHSTDTGKVSPGKAASWKDPFQWMVFTGFSKTTVSSGRAAIMQFVSP

SEQ ID NO: 375 - protein, 160 aa, Homo sapiens
  misc_feature (17): Xaa equals any of the naturally occurring L-amino acids
  misc_feature (21): Xaa equals any of the naturally occurring L-amino acids
  misc_feature (54): Xaa equals any of the naturally occurring L-amino acids
GRGPRSASAARAKAGLXALQXFQVGDLLFSCPAYAYVLTVNERGNHCEYCFTRXEGLSKCGRCKQAFYCNVECQKEDWPMHKLECSPMVVFGENWNPSETVRLTARILAKQKIHPERTPSEKLLAVKEFESHLDKLDNEKKDLIQSDIAALHHFYSKHLE

SEQ ID NO: 376 - protein, 93 aa, Homo sapiens
  misc_feature (46): Xaa equals any of the naturally occurring L-amino acids
  misc_feature (55): Xaa equals any of the naturally occurring L-amino acids
HLMSPKLGFDAFLDPGLYRWNHLCCDTFSFSYCGSREIAHFFCELXPTNPLMHEXQYLKGYFHCSIVMLVSLLHHMFLCWSYLAVITWIWRGG

SEQ ID NO: 377 - protein, 167 aa, Homo sapiens
AIISGMNMSPVSRLKKTWGQSEDGQVFHPRAPDGPNGNFCNYRTALRGAAHRSLTAHSSREKIVIPFFSLLIKDIYFLNEGCANRLPNGHVNFEKFLELAKQVGEFITWKQVECPFEQDASITHYLYTAPIFSEDGLYLASYESESPENQTEKERWKALRSSILGKT

SEQ ID NO: 378 - protein, 336 aa, Homo sapiens
  misc_feature (132): Xaa equals any of the naturally occurring L-amino acids
  misc_feature (312): Xaa equals any of the naturally occurring L-amino acids
  misc_feature (319): Xaa equals any of the naturally occurring L-amino acids
  misc_feature (332): Xaa equals any of the naturally occurring L-amino acids
VDPSKCPASELPEHQARLRNSCEEPPRLTIHCLFCTSWFPAELGIVFSSWREACKERGSEVLGPRLVCASLFLRLLCPAILAPSLFGLAPDHPAPGPARTLTLIAKVIQNLANRAPFGEKEAYMGFMNSFLXEHGPAMQCFLDQVAMVDVDAAPSGYQGSGDLALQLAVLHAQLCTIFAELDQTTRDTLEPLPTILRAIEEGQPVLVSVPMRLPLPPAQVHSSLSAGRSPASWPPGTSPSTPLSSPRASLCAVSPLRELGPATAGRRAAPAAAPAGAAHAECPGPASCPPPPICGALAATQRLPEHGTSAPXPALDPGXRFAASEASVTLAXPNWN

SEQ ID NO: 379 - protein, 180 aa, Homo sapiens
  misc_feature (146): Xaa equals any of the naturally occurring L-amino acids
  misc_feature (152): Xaa equals any of the naturally occurring L-amino acids
  misc_feature (164): Xaa equals any of the naturally occurring L-amino acids
  misc_feature (171): Xaa equals any of the naturally occurring L-amino acids
  misc_feature (175): Xaa equals any of the naturally occurring L-amino acids
PLTLSMANTTGEPEEVSGALSPPSASAYVKLVLLGLIMCVSLAGNAILSLLVLKERALHKAPYYFLLDLCLADGIRSAVCFPFVLASVRHGSSWTFSALSCKIVAFMAVLFCFHAAFMLFCISVTRYMAIAHHRFYAKRMTLWTCXAASAWXGPCLWPWPFHLXLTWAPTXYSGXGPVHL

SEQ ID NO: 380 - protein, 191 aa, Homo sapiens
KASWMEVVQVLTKPAGNPSCMYPQGTFVIPLLVTAHRDPTQFKDPDCFNPTNFLDKGKFQGNDAFMPFASGAGRGGRGPAWTGSGVPGAHCAPVYPAKQMCLGTGLAHSGIFLFLTATLQRFCLLPVVRPGTINLTCSALAWAVSPQTSSSSQWPAEVRLHYGGLTGPQTSIPSSVNKGPKLQKKKKKKKK

SEQ ID NO: 381 - protein, 659 aa, Homo sapiens
GTRKHSTIYPSPEELEAVQNMVSTVECALKHVSDWLDETNKGTKTEGETEVKKDEAGENYSKDQGGRTLCGVMRIGLVAKGLLIKDDMDLELVLMCKDKPTETLLNTVKDNLPIQIQKLTEEKYQVEQCVNEASIIIRNTEEPTLTLKVILTSPLIRDELEKKDGENVSMKDPPDLLDRQKCLNALASLRHAKWFQARANGLKSCVIVLRILRDLCNRVPTWAPLKGWPLELICEKSIGTCNRPLGAGEALRRVMECLASGILLPGGPGLHDPCERDPTDALSYMTIQQKEDITHSAQHALRLSAFGQIYKVLEMDPLPSSKPFQKYSWSVTDKEGAGSSALKRPFEDGLGDDKDPNKKMKRNLRKILDSKAIDLMNALMRLNQIRPGLQYKLLSQSGPVHAPVFTMSVDVDGTTYEASGPSKKTAKLHVAVKVLQAMGYPTGFDADIECMSSDEKSDNESKNETVSSNSSNNTGNSTTETSSTLEVRTQGPILTASGKNPVMELNEKRRGLKYELISETGGSHDKRFVMEVEVDGQKFRGAGPNKKVAKASAALAALEKLFSGPNAANNKKKKIIPQAKGVVNTAVSAAVQAVRGRGRGTLTRGAFVGATAAPGYIAPGYGTPYGYSTAAPAYGLPKRMVLLPVMKFPTYPVPHYSFF

SEQ ID NO: 382 - protein, 175 aa, Homo sapiens
  misc_feature (16): Xaa equals any of the naturally occurring L-amino acids
  misc_feature (19): Xaa equals any of the naturally occurring L-amino acids
WFYPVMTMLGHPISPXTWXINESIDSMLEICIGFVVPFLIMGVCYFITERTLMKMPNIKISRPLKVLLTVVIVFIVTQLPYNIVKFCRAIDIIYSLITSCNMSKRMDIAIQVTESIALFHSCLNPILYVFMGASFKNYVMKVAKKYGSWRRQRQSVEEFPFDSEGPTEPTSTFSI

SEQ ID NO: 383 - protein, 120 aa, Homo sapiens
EHGEFEKNLYGTSIDSVRQVINSGKICLLSLRTQSLKTLRNSDLKPYIIFIAPPSQERLRALLAKEGKNPKPEELREIIEKTREMEQNNGHYFDTAIVNSDLDKAYQELLRLINKLDTEP

SEQ ID NO: 384 - protein, 677 aa, Homo sapiens
  misc_feature (664): Xaa equals any of the naturally occurring L-amino acids
IFLCTYRAFTTTQQVLDLLFKRYGRCDALTASSRYGCILPYSDEDGGPQDQLKNAISSILGTWLDQYSEDFCQPPDFPCLKQLVAYVQLNMPGSDLERRAHLLLAQLEHSEPIEAEPEALSPVPALKPTPELELALTPARAPSPVPAPAPEPEPAPTPAPGSELEVAPAPAPELQQAPEPAVGLESAPAPALELEPAPEQDPAPSQTLELEPAPAPVPSLQPSWPSPVVAENGLSEEKPHLLVFPPDLVAEQFTLMDAELFKKVVPYHCLGSIWSQRDKKGKEHLAPTIRATVTQFNSVANCVITTCLGNRSTKAPDRARVVEHWIEVARECRILKNFSSLYAILSALQSNSIHRLKKTWEDVSRDSFRIFQKLSEIFSDENNYSLSRELLIKEGTSKFATLEMNPKRAQKRPKETGIIQGTVPYLGTFLTDLVMLDTAMKDYLYGRLINFEKRRKEFEVIAQIKLLQSACNNYSIAPDEQFGAWFRAVERLSETESYNLSCELEPPSESASNTLRTKKNTAIVKRWSDRQAPSTELSTSGSSHSKSCDQLRCGPYLSSGDIADALSVHSAGSSSSDVEEINISFVPESPDGQEKKFWESASQSSPETSGISSASSSTSSSSASTTPVAATRTHKRSVSGLCNSSSALPLYNQQVGDCCIIRVXWTWTMATCTRASW

SEQ ID NO: 385 - protein, 259 aa, Homo sapiens
  misc_feature (240): Xaa equals any of the naturally occurring L-amino acids
  misc_feature (252): Xaa equals any of the naturally occurring L-amino acids
  misc_feature (254): Xaa equals any of the naturally occurring L-amino acids
  misc_feature (257): Xaa equals any of the naturally occurring L-amino acids
DIRNCKSKEAEIKRINKELANIRSKFKGDKALDGYSKKKYVCKLLFIFLLGHDIDFGHMEAVNLLSSNKYTEKQIGYLFISVLVNSNSELIRLINNAIKNDLASRNPTFMCLALHCIANVGSREMGEAFAADIPRILVAGDSMDSVKQSAALCLLRLYKASPDLVPMGEWTARVVHLLNDQHMGVVTAAVSLITCLCKKNPDDFKTCVSLAVSRLNRIVSSAPPTSGLHLLLRPAPCSRXTPAVLHATRFRXCXCEXAV

SEQ ID NO: 386 - protein, 158 aa, Homo sapiens
PSRYSRRPEELRILECVLKETFRLFPLFPLFARSVSEDCEVAGYRVLKGTEAVIIPYALHRDPRYFPNPEEFQPERFFPENAQGRHPYAYVPFSAGPRNCIGQKFAVMEEKTILSCILRHFWIESNQKREELGLEGQLILRPSNGIWIKLKRRNADER

SEQ ID NO: 387 - protein, 302 aa, Homo sapiens
  misc_feature (158): Xaa equals any of the naturally occurring L-amino acids
  misc_feature (288): Xaa equals any of the naturally occurring L-amino acids
KSRTRACLLSPGLSCPSHCLSFFPRVRSFARAQRGGGVGDPTPAPGGRKPTLSRAPGNRRRSALRRAMEFSWLETRWARPFYLAFVFCLALGLLQAIKLYLRRQRLLRDLRPFPAPPTHWFLGHQKFIQDDNMEKLEEIIEKYPRAFPFWIGPFQAFXCIYDPDYAKTLLSRTDPKSQYLQKFSPPLLGKGLAALDGPKWFQHRRLLTPGFHFNILKAYIEVMAHSVKMMLDKWEKICSTQDTSVEVYEHINSMSLDIIMKCAFSKETNCQTNSTHDPYAKAILNSAXSYFTACTVCCITVT

SEQ ID NO: 388 - protein, 88 aa, Homo sapiens
  misc_feature (43): Xaa equals any of the naturally occurring L-amino acids
VKAEMQKHGEDPFCPFSIISNAVSNIICSLCFGQRFDYTNSEXKKMLGFMSRGLEICLNSQVLLVNICPWLYYLPFGPFKELRQLKRI

SEQ ID NO: 389 - protein, 183 aa, Homo sapiens
  misc_feature (170): Xaa equals any of the naturally occurring L-amino acids
PLTLSMANTTGEPEEVSGALSPPSASAYVKLVLLGLIMCVSLAGNAILSLLVLKERALHKAPYYFLLDLCLADGIRSAVCFPFVLASVRHGSSWTFSALSCKIVAFMAVLFCFHAAFMLFCISVTRYMAIAHHRFYAKRMTLWTCAAVICMAWTLSVAMAFPPVFDVGTXKFIREEDKCIFEH

SEQ ID NO: 390 - protein, 292 aa, Homo sapiens
QASGTTLRPLPDLPQLKRREATSRNRALKPRGRLVLMTSCLPALRFIATPRLSAMPHIDNDVKLDFKDVLLRPKRSTLKSRSEVDLTRSFSFRNSKQTYSGVPIIAANMDTVGTFEMAKVLCKFSLFTAVHKHYSLVQWQEFAGQNPDCLEHLAASSGTGSSDFEQLEQILEAIPQVKYICLDVANGYSEHFVEFVKDVRKRFPQHTIMAGNVVTGEMVEELILSGADIIKVGIGPGSVCTTRKKTGVGYPQLSAVMECADAAHGLKGTSFQMEVAAVLGMWPRLLGQELTS

SEQ ID NO: 391 - protein, 145 aa, Homo sapiens
  misc_feature (3): Xaa equals any of the naturally occurring L-amino acids
  misc_feature (10): Xaa equals any of the naturally occurring L-amino acids
  misc_feature (11): Xaa equals any of the naturally occurring L-amino acids
  misc_feature (12): Xaa equals any of the naturally occurring L-amino acids
  misc_feature (14): Xaa equals any of the naturally occurring L-amino acids
  misc_feature (15): Xaa equals any of the naturally occurring L-amino acids
  misc_feature (16): Xaa equals any of the naturally occurring L-amino acids
  misc_feature (24): Xaa equals any of the naturally occurring L-amino acids
  misc_feature (40): Xaa equals any of the naturally occurring L-amino acids
ACXGDGGAAXXXNXXXELARLQVXTSGSKEFGTSRMGVNXLWQILEPVKQHIPLRNLGGKTIAVDLSLWVCEAQTVKKMMGSVMKPHLRNLFFRISYLTQMDVKLVFVMEGEPPKLKADVISKRNQTRYGSSGKSWSPENREITF

SEQ ID NO: 392 - protein, 315 aa, Homo sapiens
TSAAIAVHGRKREERPQHPVSCEVIKAIADTLSIPVIANGGSHDHIQQYSDIEDFRQATAASSVMVARAAMWNPSIFLKEGLRPLEEVMQKYIRYYDNHYTNTKYCLCQMLREQLESPQGRLLHAAQSSREICEAFGLGAFYEETTQELDAQQARLSAKTSEQTGEPAEDTSGVIKMAVKFDRRAYPAQITPKMCLLEWCRREKLAQPVYETVQRPLDRLFSSIVTVAEQKYQSTLWDKSKKLAEQAAAIVCLRSQGLPEGRLGEESPSLHKRKREAPDQDPGGPRAQELAQPGDLCKKPFVALGSGEESPLEGW

SEQ ID NO: 393 - protein, 102 aa, Homo sapiens
KPRPSDKIPGKSAFYQNLQNYLETELKRDNPVLIMGDMNISPTDLDIGIGEENRKRWLRTGKCSFLPEEREWMDRLMSWGLVDTFRHANPQTADRFSWVDYR

SEQ ID NO: 394 - protein, 144 aa, Homo sapiens
  misc_feature (82): Xaa equals any of the naturally occurring L-amino acids
  misc_feature (86): Xaa equals any of the naturally occurring L-amino acids
  misc_feature (87): Xaa equals any of the naturally occurring L-amino acids
  misc_feature (106): Xaa equals any of the naturally occurring L-amino acids
  misc_feature (111): Xaa equals any of the naturally occurring L-amino acids
  misc_feature (113): Xaa equals any of the naturally occurring L-amino acids
  misc_feature (114): Xaa equals any of the naturally occurring L-amino acids
  misc_feature (125): Xaa equals any of the naturally occurring L-amino acids
  misc_feature (142): Xaa equals any of the naturally occurring L-amino acids
GCILILHPSMANYSHAADNILQNLSPLTAFLKLTSLGFIIGVSVVGNLLISILLVKDKTLHRAPYYFLLDLCCSDILRSAIXFPFXXNSVKNGSTWTYGTLTCKVXAFLGXLXXFHTAFMLFCIXVTRYLISPITASIQRGXPL

SEQ ID NO: 395 - protein, 190 aa, Homo sapiens
RSPSATMGNGMNKILPGLYIGNFKDARDAEQLSKNKVTHILSVHDSARPMLEGVKYLCIPAADSPSQNLTRHFKESIKFIHECRLRGESCLVHCLAGVSRSVTLVIAYIMTVTDFGWEDALHTVRAGRSCANPNVGFQRQLQEFEKHEVHQYRQWLKEEYGESPLQDAEEAKNILAAPGILKFWAFLRRL

SEQ ID NO: 396 - protein, 110 aa, Homo sapiens
GTSPHTTRSRRDQEVAGRDYHFVSRQAFEADIAAGKFIEHGEFEKNLYGTSIDSVRQVINSGKICLLSLRTQSLKTLRNSDLKPYIIFIAPPFTRKTSGIIGQRRQESKA

SEQ ID NO: 397 - protein, 137 aa, Homo sapiens
NRICVLDVDLQGVRNIKATDLRPIYISVQPPSLHVLVCAGQGWGLGARACQALIATPFLGAAAAAGNTETEESLVKRLAAAQADMESSECAVGSPGNARRGVRVLRSVAPGTLWVPRPPDTWSPCEGPQTSQLPPNT

SEQ ID NO: 398 - protein, 466 aa, Homo sapiens
PRVRSAAPLGANVVGPRSPRWRLSEIPSCAELGRGTSQRPASTCFHPWGMTTQLGPALVLGVALCLGCGQPLPQVPERPFSVLWNVPSAHCEARFGVHLPLNALGIIANRGQHFHGQNMTIFYKNQLGLYPYFGPRGTAHNGGIPQALPLDRHLALAAYQIHHSLRPGFAGPAVLDWEEWCPLWAGNWGRRRAYQAASWAWAQQVFPDLDPQEQLYKAYTGFEQAARALMEDTLRVAQALRPHGLWGFYHYPACGNGWHSMASNYTGRCHAATLARNTQLHWLWAASSALFPSIYLPPRLPPAHHQAFVRHRLEEAFRVALVGHRHPLPVLAYVRLTHRRSGRFLSQDDLVQSIGVSAALGAAGVVLWGDLSLSSSEEECWHLHDYLVDTLGPYVINVTRAAMACSHQRCHGHGRCARRDPGQMEAFLHLWPDGSLGDWKSFSCHCYWGWAGPTCQEPRPGPKEAV

SEQ ID NO: 399 - protein, 222 aa, Homo sapiens
PFTMGSSRLRVFDPHLERKDSAAALSDRELPLPTFDVPYFKYIDEEDEDDEWSSRSQSSTEDDSVDSLLSDRYVVVSGTPEKILEHLLNDLHLEEVQDKETETLLDDFLLTYTVFMTTDDLCQALLRHYSAKKYQGKEENSDVPRRKRKVLHLVSQWIALYKDWLPEDEHSKMFLKTIYRNVLDEGYEYPILEKELKEFQKILGMDRRHTGNEYSPQKKKKK

SEQ ID NO: 400 - protein, 286 aa, Homo sapiens
GTSWELGPRSGPEMAAADGALPEAAALEQPAELPASVRASIERKRQRALMLRQARLAARPYSATAAAATGGMANVKAAPKIIDTGGGFILEEEEEEEQKIGKVVHQPGPVMEFDYVICEECGKEFMDSYLMNHFDLPTCDNCRDADDKHKLITKTEAKQEYLLKDCDLEKREPPLKFIVKKNPHHSQWGDMKLYLKLQIVKRSLEVWGSQEALEEAKEVRQENREKMKQKKFDKKVKELRRAVRSSVWKRETIVHQHEYGPEENLEDDMYRKTCTMCGHELTYEKM

SEQ ID NO: 401 - protein, 93 aa, Homo sapiens
DNGSKIQNFVLEWDEGKGNGEFCQCYMGSQKQFKITKLSPAMGCKFRLSARNDYGTSGFSEEVLYYTSGCAPSMPASPVLTKAGITWLSLQWE

SEQ ID NO: 402 - protein, 535 aa, Homo sapiens
SEKCWQNAAAASPGGDVNPIPLRAVRGVYRLLLASGLAAPSGPSSGLSSGPCSPGPPGPVSGLRRWLDHSKHCLSVETEADSGQAGPYENWMLEPALATGEELPELTLLTTLLEGPGDKTQPPEEETLSQAPESEEEQKKKALERSMYVLSELVETEKMYVDDLGQIVEGYMATMAAQGVPESLRGRDRIVFGNIQQIYEWHRDYFLQELQRCLKDPDWLAQLFIKHELRQQLGHRLQLNDLLIKPVQRIMKYQLLLKDFLKYYNRAGMDTADLEQAVEVMCFVPKRCNDMMTLGRLRGFEGKLTAQGKLLGQDTFWVTEPEAGGLLSSRGRERRVFLFEQIIIFSEALGGGVRGGTQPGYVYKNSIKVSCLGLEGNLQGDPCRFALTSRGPEGGIQRYVLQAADPAISQAWIKHVAQILESQRDFLNALQSPIEYQRRESQTNSLGRPRGPGVGSPGRIRLGDQAQGSTHTPINGSLPSLLLSPKGEVARALLPLDKQALGDIPQAPHDSPPVSPTPKTPPCQARLAKLDEDEL

SEQ ID NO: 403 - protein, 155 aa, Homo sapiens
  misc_feature (10): Xaa equals any of the naturally occurring L-amino acids
  misc_feature (12): Xaa equals any of the naturally occurring L-amino acids
  misc_feature (152): Xaa equals any of the naturally occurring L-amino acids
  misc_feature (155): Xaa equals any of the naturally occurring L-amino acids
PTLIVSSQAXVXCSTVGIPGRPTRPEVFGIQLKEIDKNDHLYILLSTLEPTDAGILGTTKDSPKLGLLMVLLSIIFMNGNRSSEAVIWEVLRKLGLRPGIHHSLFGDVKKLITDEFVKQKYLDYARVPNSNPKEWAAQYREAMEADLKAAAXAAX

SEQ ID NO: 404 - protein, 158 aa, Homo sapiens
  misc_feature (120): Xaa equals any of the naturally occurring L-amino acids
  misc_feature (129): Xaa equals any of the naturally occurring L-amino acids
  misc_feature (151): Xaa equals any of the naturally occurring L-amino acids
ELASCGWSKKEKHSLAPNVVAFTRRFNQVSFWVVREILTAQTLKIRAEILSHFVKIAKKLLELNNLHSLMSVVSALQSAPIFRLTKTWALLNRKDKTTFEKLDYLMSKEDNYKRTREYIXSLKMVPSIXYLGRKFELAYYFLRNLLGANKXVLQVLPE

SEQ ID NO: 405 - protein, 175 aa, Homo sapiens
KPRINSQLVAQQVAQQYATPPPPKKEKKEKVEKQDKEKPEKDKEISPSVTKKNTNKKTKPKSDILKDPPSEANSIQSANATTKTSETNHTSRPRLKNVDRSTAQQLAVTVGNVTVIITDFKEKTRSSSTSSSTVTSSAGSEQQNQSSSGSESTDKGSSRSSTPKGDMSAVNDESF

SEQ ID NO: 406 - protein, 150 aa, Homo sapiens
  misc_feature (74): Xaa equals any of the naturally occurring L-amino acids
  misc_feature (95): Xaa equals any of the naturally occurring L-amino acids
RESWPPNSKLPHSQSSPTVSSTCTKVLYFTDRSLTPFMVNIPKRLEEVTLKDFKAAIDREGNHRYHFKALDPEXGTGKEEIFMMMMHPWMGRENXSLGGRRPWRELMPSIRLRAYGTWSLPGCFTQERELKPEYTKKFLVCVPKQKLLQA

SEQ ID NO: 407 - protein, 203 aa, Homo sapiens
IRHEPKMGRRSIESPSLGFCTDTLLPHLLEDDLGQLSDLEPEPDAQNWQHTVGKDVVAGLTQREIDRQEVINELFVTEASHLRTLRVLDLIFYQRMKKENLMPREELARLFPNLPELIEIHNSWCEAMKKLREEGPIIKEISDLMLARFDGPAREELQQVAAQFCSYQSIALELIKTKQRKESRFQLFMQEAESHPSVSAACS

SEQ ID NO: 408 - protein, 194 aa, Homo sapiens
PTRPRVPNSNPPEYEFFWGLRSYYETSKMKVLKFACKLQSSQEPEAPPPRDVALLQGRANDLVKYLLAKDQTKIPIKRSDMLKDIIKEYTDVYPEIIERAGYSLEKVFGIQLKEIDKNDHLYILLSTLEPTDAGILGTTKDSPKLGLLMVLLSIIFMNGNRSSEAVIWEVHPQKPTQHSTLGSHYQSIEVDTLH

SEQ ID NO: 409 - protein, 125 aa, Homo sapiens
QLPNAVKSYFQGISLYLEKKEESLCTWEVGARNHEILLFFIKLASKINSLGTDLCLHEMITIDTLHYIPICLVILKDYLFCLHNEMIESNLSQYLLVMSSNCMIKHPVLRGISSPWMILLIYPCT

SEQ ID NO: 410 - protein, 101 aa, Homo sapiens
GRDDPGASPQSSSQPDHGRLSPPEAPDRPTISTASETSVYVTWIPRGNGGFPIQSFRVEYKKLKKVGDWILATSAIPPSRLSVEITGLRERHLLQVSSSGF

SEQ ID NO: 411 - protein, 229 aa, Homo sapiens
PATLSGAALKHVHVLAEAQPAHLVAMAPGSRTSLLLAFALLCLPWLQEAGAVQTVPLSRLFDHAMLQAHRAHQLAIDTYQEFEETYIPKDQKYSFLHDSQTSFCFSDSIPTPSNMEETQQKSNLELLRISLLLIESWLETVRFLRSMFANNLVYDTSDSDDYHLLKDLEEGIQTLMGRLEDGSRRTGQILKQTYSKFDTNSHNHDALLKNYGLLYCFRKDMDKVSGPLM

SEQ ID NO: 412 - protein, 138 aa, Homo sapiens
  misc_feature (122): Xaa equals any of the naturally occurring L-amino acids
ARGMQSQSPGASPWAAMWVSTASTLMNTLFNTTFETEEASHHEACVRLRPQTYDLQESNVQLKLTIVDAVGFGDQINKDERPIVDYIDAPVLKNYLQEEAERSAARSSNYHDTGIHFCLYSXTPTGHSLKFSKSIDLE

SEQ ID NO: 413 - protein, 354 aa, Homo sapiens
NYLQEELKIRRSLFDYHDTRIHVCLYFITPTGHSLKSLDLVTMKKLDSKVNIIPIIAKADTISKSELHKFKIKIMGELVSNGVQIYQFPTDDEAVAEINAVMNAHLPFAVVGSTEEVKVGNKLVRARQYPWGVVQVENENHCDFVKLREMLIRVNMEDLREQTHSRHYELYRRCKLEEMGFQDSDGDSQPFSLQETYEAKRKEFLSELQRKEEEMRQMFVNKVKETELELKEKERELHEKFEHLKRVHQEEKRKVEEKRRELEEETNAFNRRKAAVEALQSQALHATSQQPLRKDKDKKNRSDIGAHQPGMSLSSSKVMMTKASVEPLNCSSWWPAIQCCSCLVRDATWREGFL

SEQ ID NO: 414 - protein, 379 aa, Homo sapiens
  misc_feature (2): Xaa equals any of the naturally occurring L-amino acids
  misc_feature (92): Xaa equals any of the naturally occurring L-amino acids
  misc_feature (124): Xaa equals any of the naturally occurring L-amino acids
EXDYATNTQDEEETKKEESLKSPLKPESQLDLRVQELIKLICNVQAMEEMMMEMKYNTKKAPLGKLTVAQIKAGYQSLKKIEDCIRAGQHGXALMEACNEFYTRIPHDFGLRTPPLIRTQKELXEKIQLLEALGDIEIAIKLVKTELQSPEHPLDQHYRNLHCALRPLDHESYEFKVISQYLQSTHAPTHSDYTMTLLDLFEVEKDGEKEAFREDLHNRMLLWHGSRMSNWVGILSHGLRIAPPEAPITGYMFGKGIYFADMSSKSANYCFASRLKNTGLLLLSEVALGQCNELLEANPKAEGLLQGKHSTKGLGKMAPSSAHFVTLNGSTVPLGPASDTGILNPDGYTLNYNEYIVYNPNQVRMRYLLKVQFNFLQLW

SEQ ID NO: 415 - protein, 190 aa, Homo sapiens
  misc_feature (186): Xaa equals any of the naturally occurring L-amino acids
WVPRAAEFGHESLRPLDHESYEFKVISQYLQSTHAPTHSDYTMTLLDLFEVEKDGEKEAFREDLHNRMLLWHGSRMSNWVGILSHGLRIAPPEAPITGYMFGKGIYFADMSSKSANYCFASRLKNTGLLLLSEVALGQCNELLEANPKAEGLLQGKHSTKGLGKMAPSSAHFVTLNGSTVPLGPQXTQDS

SEQ ID NO: 416 - protein, 488 aa, Homo sapiens
QMEKKECPEKSSSSEEELPRRVYRELPCVSETLCDISHFFQEDDETEAEPLLFRAVPECQLSGGDIPSVSEEQESSEGQDSGDICSEENQIVSSYASKVCFEIEEDYKNRQFLGPEGNVDVELIDKSTNRYSVWFPTAGWYLWSATGLGFLVRDEVTVTIAFGSWSQHLALDLQHHEQWLVGGPLFDVTAEPEEAVAEIHLPHFISLQAGEVDVSWFLVAHFKNEGMVLEHPARVEPFYAVLESPSFSLMGILLRIASGTRLSIPITSNTLIYYHPHPEDIKFHLYLVPSDALLTKAIDDEEDRFHGVRLQTSPPMEPLNFGSSYIVSNSANLKVMPKELKLSYRSPGEIQHFSKFYAGQMKEPIQLEITEKRHGTLVWDTEVKPVDLQLVAASAPPPFSGAAFVKENHRQLQARMGDLKGVLDDLQDNEVLTENEKELVEQEKTRQSKNEALLSMVEKKGDLALDVLFRSISERDPYLVSYLRQQNL

SEQ ID NO: 417 - protein, 550 aa, Homo sapiens
GRPTRPVSLRLGDLVWGKLGRYPPWPGKIVNPPKDLKKPRGKKCFFVKFFGTEDHAWIKVEQLKPYHAHKEEMIKINKGKRFQQAVDAVEEFLRRAKGKDQTSSHNSSDDKNRRNSSEERSRPNSGDEKRKLSLSEGKVKKNMGEGKKRVSSGSSERGSKSPLKRAQEQSPRKRGRPPKDEKDLTIPESSTVKGMMAGPMAAFKWQPTASEPVKDADPHFHHFLLSQTEKPAVCYQAITKKLKICEEETGSTSIQAADSTAVNGSITPTDKKIGFLGLGLMGSGIVSNLLKMGHTVTVWNRTAEKEGARLGRTPAEVVSTCDITFACVSDPKAAKDLVLGPSGVLQGIRPGKCYVDMSTVDADTVTELAQVIVSRGGRFLEAPVSGNQQLSNDGMLVILAAGDRGLYEDCSSCFQAMGKTSFFLGEVGNAAKMMLIVNMVQGSFMATIAEGLTLAQVTGQSQQTLLDILNQGQLASIFLDQKCQNILQGNFKPDFYLKYIQKDLRLAIALGDAVNHPTPMAAAANEVYKRAKALDQSDNDMSAVYRAYIH

SEQ ID NO: 418 - protein, 390 aa, Homo sapiens
ARAHTPGPARTRQLLEAPPGPTSTRHLEPLAPMDPLRRSPSPCLSSQPSSPSTPPCEMLGPVGIEAVLDQLKIKAMKMGFEFNIMVVGQSGLGKSTMVNTLFKSKVWKSNPPGLGVPTPQTLQLHSLTHVIEEKGVKLKLTVTDTPGFGDQINNDNCWDPILGYINEQYEQYLQEEILITRQRHIPDTRVHCCVYFVPPTGHCLRPLDIEFLQRLCRTVNVVPVIARADSLTMEEREAFRRRIQQNLRTHCIDVYPQMCFDEDINDKILNSKLRDRIPFAVVGADQEHLVNGRCVLGRKTKWGIIEVENMAHCEFPLLRDLLIRSHLQDLKDITHNIHYENYRVIRLNESHLLPRGPGWVNLAPASPGQLTTPRTFKVCRGAHDDSDDEF

SEQ ID NO: 419 - protein, 146 aa, Homo sapiens
  misc_feature (134): Xaa equals any of the naturally occurring L-amino acids
  misc_feature (140): Xaa equals any of the naturally occurring L-amino acids
  misc_feature (142): Xaa equals any of the naturally occurring L-amino acids
ALLEIYEKDEKIQKHLQDSLADLKSLYNEWGCTNYINLGSFLIKPVQRVMRYPLLLMELLNSTPESHPDKVPLTNAVLAVKEINVNINEYKRRKDLVLKYRKGDEDSLMEKISKLNIHSIIKKSNRVSSHLKHXTGFAPXIXDESI

SEQ ID NO: 420 - protein, 201 aa, Homo sapiens
  misc_feature (193): Xaa equals any of the naturally occurring L-amino acids
SSAPNAVAFTRRFNHVSFWVVREILHAQTLKIRAEVLSHYIKTAKKLYELNNLHALMAVVSGLQSAPIFRLTKTWALLSRKDKTTFEKLEYVMSKEDNYKRLRDYISSLKMTPCIPYLGIYLSDLTYIDSAYPSTGSILENEQRSNLMNNILRIISDLQQSCEYDIPMLPHVQKYLNSVQYIEELQKFCGRRXLPVGWIFK

SEQ ID NO: 421 - protein, 125 aa, Homo sapiens
RFSDLNPQPSFPGTFPQCSGCFPTSAPSHPSHSFLSNLFSRKENSSYIQLYLSRNVNQHVTTPPECLYFEPFLSFFVELKTIGHLGLSHSGFPSFSREKELPRVDPTPLPLRAACGYLPILVAGM

SEQ ID NO: 422 - protein, 168 aa, Homo sapiens
DLGQIVEGYMATMAAQGVPESLRGRDRIVFGNIQQIYEWHRDYFLQELQRCLKDPDWLAQLFIKHERRLHMYVVYCQNKPKSEHVVSEFGDSYFEELRQQLGHRLQLNDLLIKPVQRIMKYQLLLKDFLKYYNRAGMDTADLEQAVEVMCFVPKRCNDMMTLGKIAGI

SEQ ID NO: 423 - protein, 567 aa, Homo sapiens
FPLHGRPGWGARGGPGAMRGGHKGGRCACPRVIRKVLAKCGCCFARGGRESYSIAGSEGSISASAASGLAAPSGPSSGLSSGPCSPGPPGPVSGLRRWLDHSKHCLSVETEADSGQAGPYENWMLEPALATGEELPELTLLTTLLEGPGDKTQPPEEETLSQAPESEEEQKKKALERSMYVLSELVETEKMYVDDLGQIVEGYMATMAAQGVPESLRGRDRIVFGNIQQIYEWHRDYFLQELQRCLKDPDWLAQLFIKHELRQQLGHRLQLNDLLIKPVQRIMKYQLLLKDFLKYYNRAGMDTADLEQAVEVMCFVPKRCNDMMTLGRLRGFEGKLTAQGKLLGQDTFWVTEPEAGGLLSSRGRERRVFLFEQIIIFSEALGGGVRGGTQPGYVYKNSIKVSCLGLEGNLQGDPCRFALTSRGPEGGIQRYVLQAADPAISQAWIKHVAQILESQRDFLNALQSPIEYQRRESQTNSLGRPRGPGVGSPGRIRLGDQAQGSTHTPINGSLPSLLLSPKGEVARALLPLDKQALGDIPQAPHDSPPVSPTPKTPPCQARLAKLDEDEL

SEQ ID NO: 424 - protein, 275 aa, Homo sapiens
  misc_feature (14): Xaa equals any of the naturally occurring L-amino acids
  misc_feature (37): Xaa equals any of the naturally occurring L-amino acids
SVNLSWAETAAATXQERHGRGAVCAAIRFRTEAQRSXAKSSYLATEPIITTATPAAATVSATSKMCPGNWLWASMTFMARFSRSSSRSPVRTRGTLEEMPTVQHPFLNVFELERLLYTGKTACNHADEVWPGLYLGDQDMANNRRELRRLGITHVLNASHSRWRGTPEAYEGLGIRYLGVEAHDSPAFDMSIHFQTAADFIHRALSQPGGKILVHCAVGVSRSATLVLAYLMLYHHLTLVEAIKKVKDHRGIIPNRGFLRQLLALDRRLRQGLEA

SEQ ID NO: 425 - protein, 52 aa, Homo sapiens
VIGVEVQPQICFPRRRPCSRRCSSGAAWVPRAFIRLSDPHFLSLKQSSLLQA

SEQ ID NO: 426 - protein, 122 aa, Homo sapiens
  misc_feature (14): Xaa equals any of the naturally occurring L-amino acids
  misc_feature (120): Xaa equals any of the naturally occurring L-amino acids
HEYEFKVRPSSGRXRGPDSNVLLLRLPEKVPSAPPQEVTLKPGNGTVFVSWVPPPAENHNGIIRGYQVWSLGNTSLPPANWTVVGEQTQLEIATHMPGSYCVQWLQSLVLELGSPVDLSXSF

SEQ ID NO: 427 - protein, 195 aa, Homo sapiens
  misc_feature (171): Xaa equals any of the naturally occurring L-amino acids
  misc_feature (179): Xaa equals any of the naturally occurring L-amino acids
  misc_feature (192): Xaa equals any of the naturally occurring L-amino acids
WSKPEGCSPEEVITYTLEIQEDENDNLFHPKYTGEDLTCTVKNLKRSTQYKFRLTASNTEGKSCPSEVLVCTTSPDRPGPPTRPLVKGPVTSHGFSVKWDPPKDNGGSEILKYLLEITDGNSEANQWEVAYSGSATEYTFTHLKPGTLYKLRACCISTGGHSQCSESLPVXTLSIAPGXCRPPRVWVDQSTXKST

SEQ ID NO: 428 - protein, 246 aa, Homo sapiens
GRPTRPISSKKKKKMMYLTTRNAEFDRHEIQIYEEVAKMPPFQRKTLVLIGAQGVGRRSLKNRFIVLNPTRFGTTVPFTSRKPREDEKDGQAYKFVSRSEMEADIKAGKYLEHGEYEGNLYGTKIDSILEVVQTGRTCILDVNPQALKVLRTSEFMPYVVFIAAPELETLRAMHKAVVDAGITTKLLTDSDLKKTVDESARIQRAYNHYFDLIIINDNLDKAFEKLQTAIEKLRMEPQWVPISWVY

SEQ ID NO: 429 - protein, 142 aa, Homo sapiens
RCGLYPEFNQVSFWVVREILTAQTLKIRAEILSHFVKIAKKLLELNNLHSLMSVVSALQSAPIFRLTKTWALLNRKDKTTFEKLDYLMSKEDNYKRTREYIRSLKMVPSIPYLGIYLLDLIYIDSAYPASGVSWKMNKDPIR

SEQ ID NO: 430 - protein, 254 aa, Homo sapiens
EKPLNDTVTEYEVISRENGSFSGKNKSIQMTNQTFSTVENLKPNTSYEFQVKPKNPLGEGPVSNTVAFSTESADPRVSEPVSAGRDAIWTERPFNSDSYSECKGKQYVKRTWYKKFVGVQLCNSLRYKIYLSDSLTGKFYNIGDQRGHGEDHCQFVDSFLDGRTGQQLTSDQLPIKEGYFRAVRQEPVQFGEIGGHTKSIMFSGMNVGLQFLENGRCCTKLPSVSSLQTKIIENTMPHSFKAILFTMYKSLQSN

SEQ ID NO: 431 - protein, 230 aa, Homo sapiens; identical to SEQ ID NO: 324

SEQ ID NO: 432 - protein, 465 aa, Homo sapiens
YSRFTVPLPATMASSEVARHLLFQSHMATKTTCMSSQGSDDEQIKRENIRSLTMSGHVGFESLPDQLVNRSIQQGFCFNILCVGETGIGKSTLIDTLFNTNFEDYESSHFCPNVKLKAQTYELQESNVQLKLTIVNTVGFGDQINKEESYQPIVDYIDAQFEAYLQEELKIKRSLFTYHDSRIHVCLYFISPTGHSLKTLDLLTMKNLDSKVNIIPVIAKADTVSKTELQKFKIKLMSELVSNGVQIYQFPTDDDTIAKVNAAMNGQLPFAVVGSMDEVKVGNKMVKARQYPWGVVQVENENHCDFVKLREMLICTNMEDLREQTHTRHYELYRRCKLEEMGFTDVGPENKPVSVQETYEAKRHEFHGERQRKEEEMKQMFVQRVKEKEAILKEAERELQAKFEHLKRLHQEERMKLEEKRRLLEEEIIAFSKKKATSEIFHSQSFLATGSNLRKDKDRKNSNFL

SEQ ID NO: 433 - protein, 119 aa, Homo sapiens
  misc_feature (40): Xaa equals any of the naturally occurring L-amino acids
  misc_feature (83): Xaa equals any of the naturally occurring L-amino acids
  misc_feature (85): Xaa equals any of the naturally occurring L-amino acids
  misc_feature (95): Xaa equals any of the naturally occurring L-amino acids
AVLNVSASCPNHFKGLFRYKSIPVEDNQMVEISAWFQEAXGFIGKGAPLPRNPEGLQRRGLGAPVSWAVHIPSDTTPPSPLQXGXKNSGGRVLVXCQAGISRSATICLAYLMQSRRVRL

SEQ ID NO: 434 - protein, 378 aa, Homo sapiens
GTREFATEGTDRKDVFFYQADDEHYIPRAVLLDLEPRVIHSILNSPYAKLYNPENIYLSEHGGGAGNNWASGFSQGEKIHEDIFDIIDREADGSDSLELQNSSRVIKGFVLCHSIAGGTGSGLGSYLLERLNDRYPKKLVQTYSVFPYQDEMSDVVVQPYNSLLTLKRLTQNADCVVVLDNTALNRIATDRLHIQNPSFSQINQLVSTIMSASTTTLRYPGYMNNDLIGLIASLIPTPRLHFLMTGYTPLTTDQSVASVRKTTVLDVMRRLLQPKNVMVSTGRDRQTNHCYIAILNIIQGEVDPTQVHKSLQRIRERKLANFIPWGPASIQVALSRKSPYLPSAHRVSGLMMANHTSISSLFESSCQQFDKLRKRDAF

SEQ ID NO: 435 - protein, 224 aa, Homo sapiens
DPRVRGRVGASAGADGSPLRRAGMAATALLEAGLARVLFYPTLLYTLFRGKVPGRAHRDWYHRIDPTVLLGALPLRSLTRQLVQDENVRGVITMNEEYETRFLCNSSQEWKRLGVEQLRLSTVDMTGIPTLDNLQKGVQFALKYQSLGQCVYVHCKAGRSRSATMVAAYLIQVHKWSPEEAVRAIAKIRSYIHIRPGQLDVLKEFHKQITARATKDGTFVISKT

SEQ ID NO: 436 - protein, 245 aa, Homo sapiens
LIPRSLQLPREVGSQPAAMSDINLDWVDRRQLQRLEEMLIVVDENDKVIGADTKRNCHLNENIEKGLLHRAFSVVLFNTKNRILIQQRSDTKVTFPGYFTDSCSSHPLYNPAELEEKDAIGVRRAAQRRLQAELGIPGEQISPEDIVFMTIYHHKAKSDRIWGEHEICYLLLVRKNVTLNPDPSETKSILYLSQEELWELLEREARGEVKVTPWLRTIAERFLYRWWPHLDDVTPFVELHKIHRV

SEQ ID NO: 437 - protein, 373 aa, Homo sapiens
PDVKTSGCSTAPRLEPQEPNSATSTTIAVYWSMNKEDVIDSFQVYCMEEPQDDQEVNELVEEYRLTVKESYCIFEDLEPDRCYQVWVMAVNFTGCSLPSERAIFRTAPSTPVIRAEDCTVCWNTATIRWRPTTPEATETYTLEYCRQHSPEGEGLRSFSGIKGLQLKVNLQPNDNYFFYVRAINAFGTSEQSEAALISTRGTRFLLLRETAHPALHISSSGTVISFGERRRLTEIPSVLGEELPSCGQHYWETTVTDCPAYRLGICSSSAVQAGALGQGETSWYMHCSEPQRYTFFYSGIVSDVHVTERPARVGILLDYNNQRLIFINAESEQLLFIIRHRFNEGVHPAFALEKPGKCTLHLGIEPPDSVRHK

SEQ ID NO: 438 - protein, 449 aa, Homo sapiens
GLSEPHTPRSSCHSRRLRGGSPAPRLSLGAASPRPRPPSLPLPLPLPFPLFLPTRPAERAWIRSRRASEWVGKMEVPRLDHALNSPTSPCEEVIKNLSLEAIQLCDRDGNKSQDSGIAEMEELPVPHNIKISNITCDSFKISWEMDSKSKDRITHYFIDLNKKENKNSNKFKHKDVPTKLVAKAVPLPMTVRGHWFLSPRTEYTVAVQTASKQVDGDYVVSEWSEIIEFCTADYSKVHLTQLLEKAEVIAGRMLKFSVFYRNQHKEYFDYVREHHGNAMQPSVKDNSGSHGSPISGKLEGIFFSCSTEFNTGKPPQDSPYGRYRFEIAAEKLFNPNTNLYFGDFYCMYTAYHYVILVIAPVGSPGDEFCKQRLPQLNSKDNKFLTCTEEDGVLVYHHAQDVILEVIYTDPVDLSLGTVAEITGHQLMSLSTANAKKDPSCKTCNISVGR

SEQ ID NO: 439 - protein, 106 aa, Homo sapiens
  misc_feature (58): Xaa equals any of the naturally occurring L-amino acids
DPRVRLTKKRVTLLILSIWAIAIFMGAVPTLGWNCLCDISACSSLAPIYSRSYLIFWXSVQPCGPFSSWLWCTWRIYMYVKRKTNVLCSTYEWVHQPPEDTHVSWM

SEQ ID NO: 440 - protein, 476 aa, Homo sapiens
  misc_feature (350): Xaa equals any of the naturally occurring L-amino acids
  misc_feature (358): Xaa equals any of the naturally occurring L-amino acids
AGCQRDAGEQSAAAREARGRRAGARALAAAGVGVKHPGAAGAGAAAAMAVAVGRPSNEELRNLSLSGHVGFDSLPDQLVNKSTSQGFCFNILCVGETGIGKSTLMDTLFNTKFESDPATHNEPGVRLKARSYELQESNVRLKLTIVDTVGFGDQINKDDSYKPIVEYIDAQFEAYLQEELKIKRSLFNYHDTRIHACLYFIAPTGHSLKSLDLVTMKKLDSKVNIIPIIAKADTIAKNELHKFKSKIMSELVSNGVQIYQFPTDEETVAEINATMSVHLPFAVVGSTEEVKIGNKMAKARQYPWGVVQVENENHCDFVKLREMLIRVNMEDLREQTHTRHYELYRRCNLXEMGFKDTXPDSKPFSLQETYEAKRNEFLGELQKKEEEMRQMFVMRVKEKEAELKEAEKELHEKFDLLKRTHQEEKKKVEDKKKELEEEVNNFQKKKAAAQLLQSQAQQSGAQQTKKDKDKKNASFT

SEQ ID NO: 441 - protein, 151 aa, Homo sapiens
  misc_feature (123): Xaa equals any of the naturally occurring L-amino acids
  misc_feature (133): Xaa equals any of the naturally occurring L-amino acids
  misc_feature (149): Xaa equals any of the naturally occurring L-amino acids
ITKKIFKSHLKSSRNSTSVKKKSSRNIFSIVFVFFVCFVPYHIARIPYTKSQTEAHYSCQSKEILRYMKEFTLLLSAANVCLDPIIYFFLCQPFREILCKKLHIPLKAQNDLDISRIKRGNTXLESTDTLVSXTLFQRKTTCACCHLQXHN

SEQ ID NO: 442 - protein, 248 aa, Homo sapiens
  misc_feature (65): Xaa equals any of the naturally occurring L-amino acids
PVPVYLDLDLELEGEDERDEDRECEDRDFERLRLLDFFLLLSSSSLASRLYFERSASSSSSSSSXLYLERSSSSSSSSPSDSLSSTSFNIDAGPTAFPLYFFFLRPNSSYSPSDSSLSIYSTFSLSLKPPPYPVLSSNLAYFGVLHILHSDLLAQFTLLQVLHCQSLALNRPRLFSASVFPISVPPAFIILASVVFSRPHRLQLVLLAKFTFPHFLSGQIQSPSLTRKFLVDILNATSTATDAWADAW

SEQ ID NO: 443 - protein, 178 aa, Homo sapiens
  misc_feature (151): Xaa equals any of the naturally occurring L-amino acids
  misc_feature (166): Xaa equals any of the naturally occurring L-amino acids
NYERWHKQRRVIDLAFSRSSLVSLMETFNEKAEQLVEILEAKADGQTPVSMQDMLTYTAMDILAKAAFGMETSMLLGAQKPLSQAVKLMLEGITASRNTLAKFLPGKRKQLREVRESIRFLRQVGRDWVQRRREALKRGEEVPADILTQIXKAEEGAQDDEGLLDXFVTFFIAGHETS

SEQ ID NO: 444 - protein, 212 aa, Homo sapiens
HEPIPTRVCKVSDLHEGHFYEFRARAANWAGVGELSAPSSLFECKEWTMPQPGPPYDVRASEVRATSLVLQWEPPLYMGAGPVTGYHVSFQEEGSEQWKPVTPGPISGTHLRVSDLQPGKSYVFQVQAMNSAGLGQPSMPTDPVLLEDKPGAHEIEVGVDEEGFIYLAFEAPEAPDSSEFQWSKDYKGPLDPQRVKIEDKVNKSKVILKEPG

SEQ ID NO: 445 - protein, 332 aa, Homo sapiens
ISDLLVGIFCMPITLLDNIIAGWPFGNTMCKISGLVQGISVAASVFTLVAIAVDRFQCVVYPFKPKLTIKTAFVIIMIIWVLAITIMSPSAVMLHVQEEKYYRVRLNSQNKTSPVYWCREDWPNQEMRKIYTTVLFANIYLAPLSLIVIMYGRIGISLFRAAVPHTGRKNQEQWHVVSRKKQKIIKMLLIVALLFILSWLPLWTLMMLSDYADLSPNELQIINIYIYPFAHWLAFGNSSVNPIIYGFFNENFRRGFQEAFQLQLCQKRAKPMEAYALKAKSHVLINTSNQLVQESTFQNPHGETLLYRKSAEKPQQELVMEELKETTNSSEI

SEQ ID NO: 446 - protein, 222 aa, Homo sapiens
ATIGYCQGLNRLAAIALLVLEEEESAFWCLVAIVETIMPADYYCNTLTASQVDQRVLQDLLSEKLPRLMAHLGQHHVDLSLVTFNWFLVVFADSLISNILLRVWDAFLYEGTKVVFRYALAIFKYNEKEILRLQNGLEIYQYLRFFTKTISNSRKLMNIAFNDMNPFRMKQLRQLRMVHRERLEAELRELEQLKAEYLERRASRRRAVSEGCASEDEVEGEA

SEQ ID NO: 447 - protein, 259 aa, Homo sapiens
  misc_feature (218): Xaa equals any of the naturally occurring L-amino acids
  misc_feature (223): Xaa equals any of the naturally occurring L-amino acids
  misc_feature (226): Xaa equals any of the naturally occurring L-amino acids
  misc_feature (254): Xaa equals any of the naturally occurring L-amino acids
  misc_feature (256): Xaa equals any of the naturally occurring L-amino acids
PRVRGWQTPPGWQGPPDWQGPPDWPLPPDWPLPPDWPLPTDWPLPPDWIPADWPIPPDWQNLRPSPNLRPSPNSRASQNPGAAQPRDVALLQERANKLVKYLMLKDYTKVPIKRSEMLRDIIREYTDVYPEIIERACFVLEKKFGIQLKEIDKEEHLYILISTPESLAGILGTTKDTPKLGLLLVILGVIFMNGNRASEGEWLDLQLGVGHSLDFHAXFPSLXSPXLPLQLVLWEALRQDGTASWGIDWVFSTXCXFCG

SEQ ID NO: 448 - protein, 79 aa, Homo sapiens
MHQNGDYTHFYFCYRWFLLDFKRELLYEDVFAVWEVIWAARHISSEHFVLFIALALVEAYREIIRDNNMDFTDIIQFFQ

SEQ ID NO: 449 - protein, 182 aa, Homo sapiens
AGCQRDAGEQSAAAREARGRRAGARALAAAGVGVKHPGAAGAGAAAAMAVAVGRPSNEELRNLSLSGHVGFDSLPDQLVNKSTSQGFCFNILCVGETGIGKSTLMDTLFNTKFESDPATHNEPGVRLKARSYELQESNVRLKLTIVDTVGFGDQINKDDSYKPIVEYIDAQFEAYLQEELKD

SEQ ID NO: 450 - protein, 421 aa, Homo sapiens
STHASEFEEIVQIVLQKSLQECLGQCLVWVQCSFPNCGKWRRLCGNIDPSVLPDNWSCDQNTDVQYNRCDIPEETWTGLESDVAYASYIPGSIIWAKQYGYPWWPGMIESDPDLGEYFLFTSHLDSLPSKYHVTFFGETVSRAWIPVNMLKNFQELSLELSVMKKRRNDCSQKLGVALMMAQEAEQISIQERVNLFGFWSRFNGSNSNGERKDLQLSGLNSPGSCLEKKEKEEELEKEEGEKTDPILPIRKRVKIQTQKTKPRGLGGDAGTADGRGRTLQRKIMKRSLGRKSTAPPAPRMGRKEGQGNSDSDQPGPKKKFKAPQSKALAASFSEGKEVRTVPKNLGLSACKGACPSSAKEEPRHREPLTQEAGSVPLEDEASSDLDLEQLMEDVGRELGQSGELQHSNSDGEDFPVALFGK

SEQ ID NO: 451 - protein, 157 aa, Homo sapiens
  misc_feature (5): Xaa equals any of the naturally occurring L-amino acids
  misc_feature (7): Xaa equals any of the naturally occurring L-amino acids
PCQMXFXRVDHGLMLTYFAAFEVFFEENLPKLCAHFKKNNLTPDIYLIDWIFTLYSKSLPLDLACRIWDVFCRDGEEFLFRTALGILKLFEDILTKMDFIHMAQFLTRLPEDLPAEELFASIATIQMQSRNKKWAQVLTALQKDSREMEKGSPSLRH

SEQ ID NO: 452 - protein, 149 aa, Homo sapiens
STHASGTGDPDLVSEGRKSFPSIHSSFAFSGLGFTTFYLAGKLHCFTESGRGKSWRLCAAILPLYCAMMIALSRMCDYKHHWQDSFVGGVIGLIFAYICYRQHYPPLANTACHKPYVSLRVPASLKKEERPTADSAPSLPLEGITEGPV

SEQ ID NO: 453 - protein, 452 aa, Homo sapiens
SSVSCAVAPVAAAPVAALADAGAMAATDIARQVGEGCRTVPLAGHVGFDSLPDQLVNKSVSQGFCFNILCVGETGLGKSTLMDTLFNTKFEGEPATHTQPGVQLQSNTYDLQESNVRLKLTIVSTVGFGDQINKEDSYKPIVEFIDAQFEAYLQEELKIRRVLHTYHDSRIHVCLYFIAPTGHSLKSLDLVTMKKLDSKVNIIPIIAKADAISKSELTKFKIKITSELVSNGVQIYQFPTDDESVAEINGTMNAHLPFAVIGSTEELKIGNKMMRARQYPWGTVQVENEAHCDFVKLREMLIRVNMEDLREQTHTRHYELYRRCKLEEMGFKDTDPDSKPFSLQETYEAKRNEFLGELQKKEEEMRQMFVQRVKEKEAELKEAEKELHEKFDRLKKLHQDEKKKLEDKKKSLDDEVNAFKQRKTAAELLQSQGSQAGGSQTLKRDKEKKNFF

SEQ ID NO: 454 - protein, 81 aa, Homo sapiens
RGKADAGQTRRGKDLSTELLRVAWVPVIARALGGGRRPLHLRAMLRVTRGPAVWGDPFCIRGFYFLPLKRWAGGVLEFNRL

SEQ ID NO: 455 - protein, 107 aa, Homo sapiens
FSLILCKHSIGDRKNYASAKLSELLPEEVEAEVKAAAEISMGTEVSEEDICNILHLCTQVIEISEYRTQLYEYLPKSNDGPLHPMLQHGWGIKLEHGLLLMQVMVLM

SEQ ID NO: 456 - protein, 379 aa, Homo sapiens
EAQQYLMDNPTFAEDEELQNMDKEDALICFEEHIRALEKEEEEEKQKSLLRERRRQRKNRESFQIFLDELHEHGQLHSMSSWMELYPTISSDIRFTNMLGQPGSTALDLFKFYVEDLKARYHDEKKIIKDILKDKGFVVEVNTTFEDFVAIISSTKRSTTLDAGNIKLAFNSLLEKAEAREREREKEEARKMKRKESAFKSMLKQAAPPIELDAVWEDIRERFVKEPAFEDITLESERKRIFKDFMHVLEHECQHHHSKNKKHSKKSKKHHRKRSRSRSGSDSDDDDSHSKKKRQRSESRSASEHSSSAESERSYKKSKKHKKKSKKRRHKSDSPESDAEREKDKKEKDRESEKDRTRQRSESKHKSPKKKTGKDSVSI

SEQ ID NO: 457 - protein, 209 aa, Homo sapiens
LHPPCPQHAWGMDSLQKQDLRRPKIHGAVQASPYQPPTLASLQRLLWVRQAATLNHIDEVWPSLFLGDAYAARDKSKLIQLGITHVVNAAAGKFQVDTGAKFYRGMSLEYYGIEADDNPFFDLSVYFLPVARYIRAALSVPQGRVLVHCAMGVSRSATLVLAFLMICENMTLVEAIQTVQAHRNICPNSGFLRQLQVLDNRLGRETGRF

SEQ ID NO: 458 - protein, 229 aa, Homo sapiens
ARVAMGLRLLKLAATSASARVVAAGAQRVRGIHSSVQCKLRYGMWHFLLGDKASKRLTERSRVITVDGNICTGKGKLAKEIAEKLGFKHFPEAGIHYPDSTTGDGKPLATDYNGNCSLEKFYDDPRSNDGNSYRLQSWLYSSRLLQYSDALEHLLTTGQGVVLERSIFSDFCVPGGDVQPGIHPKAVCGPLQRGEERHHLRLPAPPPGDLHRCARSRGPEADSEERRST

SEQ ID NO: 459 - protein, 88 aa, Homo sapiens
CFLPYHTLRTVHLTTWKVGLCKDRLHKALVITLALAAANACFNPLLYYFAGENFKDRLKSALRKGHPQKAKTKCVFPVSVWLRKETRV

SEQ ID NO: 460 - protein, 616 aa, Homo sapiens
GRPTRPGALEPALPAQAKEELAAAMVRVLRATGRAQALVTDLGTAELARCGGREALLFRENTLATKAIDEYMKLVAQDYLQETLGQVVRRLCASTEDCEVDPSKCPASELPEHQARLRNSCEEVFETIIHSYDWFPAELGIVFSSWREACKERGSEVLGPRLVCASLFLRLLCPAILAPSLFGLAPDHPAPGPARTLTLIAKVIQNLANRAPFGEKEAYMGFMNSFLEEHGPAMQCFLDQVAMVDVDAAPSGYQGSGDLALQLAVLHAQLCTIFAELDQTTRDTLEPLPTILRAIEEGQPVLVSVPMRLPLPPAQVHSSLSAGEKPGFLAPRDLPKHTPLISKSQSLRSVRRSESWARPRPDEERPLRRPRPVQRTQSVPVRRPARRRQSAGPWPRPKGSLSMGPAPRARPWTRDSASLPRKPSVPWQRQMDQPQDRNQALGTHRPVNKLAELQCEVAALREEQKVLSRLVESLSTQIRALTEQQEQLRGQLQDLDSRLRAGSSEFDSEHNLTSNEGHSLKNLEHRLNEMERTQAQLRDAVQSLQLSPGRGGLGVNPSPSKHPASMETPPELPILPHHTWSGSREIAILGGVSDFALALLGLQWGVELLVPTTLAV

SEQ ID NO: 461 - protein, 220 aa, Homo sapiens
  misc_feature (20): Xaa equals any of the naturally occurring L-amino acids
  misc_feature (25): Xaa equals any of the naturally occurring L-amino acids
EFLSFADDLLSGLGTSCVAXGRSHXEVPEVSIYSVIFKCLEPDGLYKFTLYAVDTRGRHSELSTVTLRTACPLVDDNKAEEIADKIYNLYNGYTSGKEQQMAYNTLMEVSASMLFRVQHHYNSHYEKFGDFVWRSEDELGPRKAHLILRRLERVSSHCSSLLRSAYIQSRVETVPYLFCRSEEVRPAGMVWYSILKDTKITCEEKMVSMARNTYGESKGR

SEQ ID NO: 462 - protein, 244 aa, Homo sapiens
SCCFLKRLQASFPRTAVSFEPLAGDMPRGRKSRRRRNARAAEENRNNRKIQASEASETPMAASVVASTPEDDLSGPEEDPSTPEEASTTPEEASSTAQAQKPSVPRSNFQGTKKSLLMSILALIFIMGNSAKEALVWKVLGKLGMQPGRQHSIFGDPKKIVTEEFVRRGYLIYKPVPRSSPVEYEFFWGPRAHVESSKLKVMHFVARVRNRCSKDWPCNYDWDSDDDAEVEAILNSGARGYSAP

SEQ ID NO: 463 - protein, 377 aa, Homo sapiens
  misc_feature (141): Xaa equals any of the naturally occurring L-amino acids
DWNPQNMPGNATPVTTTAPWASLGLSAKTCNNVSFEESRIVLVVVYSAVCTLGVPANCLTAWLALLQVLQGNVLAVYLLCLALCELLYTGTLPLWVIYIRNQHRWTLGLLACKVTAYIFFCNIYVSILFLCCISCDRFVAXVYALESRGRRRRRTAILISACIFILVGIVHYPVFQTEDKETCFDMLQMDSRIAGYYYARFTVGFAIPLSIIAFTNHRIFRSIKQSMGLSAAQKAKVKHSAIAVVVIFLVCFAPYHLVLLVKAAAFSYYRGDRNAMCGLEERLYTASVVFLCLSTVNGVADPIIYVLATDHSRQEVSRIHKGWKEWSMKTDVTRLTHSRDTEELQSPVALADHYTFSRPVHPPGSPCPAKRLIEESC

SEQ ID NO: 464 - protein, 102 aa, Homo sapiens
  misc_feature (36): Xaa equals any of the naturally occurring L-amino acids
  misc_feature (64): Xaa equals any of the naturally occurring L-amino acids
GVSVMAIRANRRFKKPQGGSFNAKISTWLTCCRHKXLVFVTYFANLVVVFRHESTNFSEKPVSXLSFLFRVRLSFEQPDDKAQMPSTERMTLTRCFHLFSGH

SEQ ID NO: 465 - protein, 65 aa, Homo sapiens
KYINYVAKVSVKSMENKSCIILFEIRLLYSYIFIICYLFKKVKCYGLPSSNELKTFFPTVYKSST

SEQ ID NO: 466 - protein, 121 aa, Homo sapiens
  misc_feature (7): Xaa equals any of the naturally occurring L-amino acids
  misc_feature (12): Xaa equals any of the naturally occurring L-amino acids
  misc_feature (29): Xaa equals any of the naturally occurring L-amino acids
  misc_feature (50): Xaa equals any of the naturally occurring L-amino acids
KRIGYLXAMLLXDERQDVHLLMTNCIKNXLNHSTQFVQGLALCTLGCMGXSEMCRDLAGEVEKLLKTSNSYLRKKAALCAVHVIRKVPELMEMFLPATKNLLDEKNPWCPPHICSPPHQNV

SEQ ID NO: 467 - protein, 97 aa, Homo sapiens; identical to SEQ ID NO: 297

SEQ ID NO: 468 - protein, 227 aa, Homo sapiens
  misc_feature (121): Xaa equals any of the naturally occurring L-amino acids
  misc_feature (178): Xaa equals any of the naturally occurring L-amino acids
  misc_feature (195): Xaa equals any of the naturally occurring L-amino acids
  misc_feature (220): Xaa equals any of the naturally occurring L-amino acids
SGTGGVREAHLASQSEAHYFISARCPTKKEFVINPNGNPRSASCTSTCSVSSRSALSNFFECENPSEPFGASVTIDGVTYGSGTASSKKLAKNKAARATLEILIPDFVKQTSEEKPKDSEXLEYFNHISIEDSRVYQLTIKAGLLSPYQILHECLKRNHGMGDTSIKFEVVPGKNQKXEYVMACGKHTVRGWCKXSFSAAWWPLGGWPLVWPCASVAWSXLLPWHCP

SEQ ID NO: 469 - protein, 51 aa, Homo sapiens
APGPSAACWHELLDKKVLNQEEMERVRCENATTMDKARALIDSIIRKGPQA

SEQ ID NO: 470 - protein, 215 aa, Homo sapiens
  misc_feature (211): Xaa equals any of the naturally occurring L-amino acids
  misc_feature (213): Xaa equals any of the naturally occurring L-amino acids
ERSREDLSALTRQGRYPPYERVVLREASFKRPVVILGPVADIAMQKLTAEMPDQFEIAETVSRTDSPSKIIKLDTVRVIAEKDKHALLDVTPSAIERLNYVQYYPIVVFFIPESRPALKALRQWLAPASRRSTRRLYAQAQKLRKHSSHLFTATIPLNGTSDTWYQELKAIIREQQTRPIWTAEDQLDGSLEDNLDLPHHGLAHSSADLSXRXRV

SEQ ID NO: 471 - protein, 378 aa, Homo sapiens
ATYRTAIVQNQHLAMLAKKLELDRFMLYAHGPDLCRESDLRHAMANCFEALIGAVYLEGSLEEAKQLFGRLLFNDPDLREVWLNYPLHPLQLQEPNTDRQLIETSPVLQKLTEFEEAIGVIFTHVRLLARAFTLRTVGFNHLTLGHNQRMEFLGDSIMQLVATEYLFIHFPDHHEGHLTLLRSSLVNNRTQAKVAEELGMQEYAITNDKTKRPVALRTKTLADLLESFIAALYIDKDLEYVHTFMNVCFFPRLKEFILNQDWNDPKSQLQQCCLTLRTEGKEPDIPLYKTLQTVGPSHARTYTVAVYFKGERIGCGKGPSIQQAEMGAAMDALEKYNFPQMAHQKRFIERKYRQELKEMRWEREHQEREPDETEDIKK

SEQ ID NO: 472 - protein, 121 aa, Homo sapiens
  misc_feature (71): Xaa equals any of the naturally occurring L-amino acids
  misc_feature (72): Xaa equals any of the naturally occurring L-amino acids
  misc_feature (88): Xaa equals any of the naturally occurring L-amino acids
LIPRSLQLPREVGSQPAAMSDINLDWVDRRQLQRLEEMLIVVDENDKVIGADTKRNCHLNENIEKGLLHRXXSVVLFNTKNRILIQQXSDTKVTFPDFSRGHCVHDNLSPQGKIRQNLGRA

SEQ ID NO: 473 - protein, 137 aa, Homo sapiens; identical to SEQ ID NO: 316

SEQ ID NO: 474 - protein, 260 aa, Homo sapiens
EFVLLGWLGGKMAAVSLRLGDLVWGKLGRYPPWPGKIVNPPKDLKKPRGKKCFFVKFFGTEDHAWIKVEQLKPYHAHKEEMIKINKGKRFQQAVDAVEEFLRRAKGKDQTSSHNSSDDKNRRNSSEERSRPNSGDEKRKLSLSEGKVKKNMGEGKKRVSSGSSERGSKSPLKRAQEQSPRKRGRPPKDEKDLTIPESSTVKGMMAGPMAAFKWQPTASEPVKDADPHFHHFLLSQTEKPAVCYQAITKKLKICEDLLLPR

SEQ ID NO: 475 - protein, 145 aa, Homo sapiens
DLSVKMLKDFLEDDTDVNQYLLPPKSLLRYALLLDIVQPTCRRSVCFTKGYGSYIEGTGSVLQTAEDVQVENIYKSLTNLSQEEQITKLLILKLRYFTPKEIANLLGFPPEFGFPEKITVKQRYRLLGNSLNVHVVAKLIKILYE

SEQ ID NO: 476 - protein, 184 aa, Homo sapiens
  misc_feature (163): Xaa equals any of the naturally occurring L-amino acids
ASSLWKSKLLVSYQEIPFYHIWNGTQRYLHCTFTLERVSPSTSDLACKLWVWQVEGDGQSFSINFNITKDTRFAELLALESEARVPALVGPSAFKIPFLIRQKIISSLDPPCRRGADWRTLAQKLHLDSHLSFFASKPSPTAMILNLWEARHFPNGNLSQLAXAVAGTGPAGRWLLSQCSEAEC

SEQ ID NO: 477 - protein, 107 aa, Homo sapiens
LAAAILVGQGVKSWIKDKVQEPRPFVIWLEKTHHIPVDEFYTLKRAERGNLVKEQLAEEKNIPQYLRSHWQKETGFAFPSGHTMFAASWALLAVGLLWPRRRTLNHC

SEQ ID NO: 478 - protein, 214 aa, Homo sapiens
  misc_feature (1): Xaa equals any of the naturally occurring L-amino acids
  misc_feature (33): Xaa equals any of the naturally occurring L-amino acids
  misc_feature (207): Xaa equals any of the naturally occurring L-amino acids
XIPPRLYQICGWFIPWLAIASVVVLTVGWIWGXGFAPADYQQGNSYRIIYLHVPAAIWSMGIYASMAVAAFIGLVWQMKMANLAVAAMAPIGAVFTFIALVTGSAWGKPMWGTWWVWDARLTSELVLLFLYVGVIALWHAFDDRRLAGRAAGILVLIGVVNLPIIHYSVEWWNTLHQGSTRMQQSIDPAMRSPLRWSIFGFLLLSAXADADADA

SEQ ID NO: 479 - protein, 143 aa, Homo sapiens
  misc_feature (129): Xaa equals any of the naturally occurring L-amino acids
RFAGRHLEQLMLLPLPLPAVVLAKVMAHWMVTGLPLLILSPLVAMLLGMDVYGWQVMALTLLLGTPTLGFLGAPGVALTVGLKRGGVLLSILVLPLTIPLLIFATAAMDAASMHCPLTVSGNLGALLAXTATLSPFATAAALR

SEQ ID NO: 480 - protein, 162 aa, Homo sapiens
  misc_feature (128): Xaa equals any of the naturally occurring L-amino acids
ERSGLSWSNREKAKQAFKELLRDKAVPSNASWEQAMKMVVTDPRYSALPKLSEKKQAFNAYKAQREKEEKEEARLRAKEAKQTLQHFLEQHERMTSTTRYRRAEQTFGELEVWAVVPERDRKEVYDDXLFFLAKKEKEQAKQLRRRNIQALKSILDGMSSVN

SEQ ID NO: 481 - protein, 88 aa, Homo sapiens
VAAYENREGRKLMSVSRYRTAVCSSTSTVCALRNMAQETNHSQVPMLCSTGCGFYGNPRTNGMCSVCYKEHLQRQNSSMVDKPLQLCQ

SEQ ID NO: 482 - protein, 125 aa, Homo sapiens
  misc_feature (111): Xaa equals any of the naturally occurring L-amino acids
  misc_feature (112): Xaa equals any of the naturally occurring L-amino acids
QRECLSIHIGQAGIQIGDACWELYCLEHGIQPNGVVLDTQQDQLENAKMEHTNASFDTFFCETRAGKHVPRALFVDLEPTVIDGIRTGQHRSLFTPSSSLAERRMLPTITXXGRYSVGSEVIDLC

SEQ ID NO: 483 - protein, 143 aa, Homo sapiens
  misc_feature (140): Xaa equals any of the naturally occurring L-amino acids
REQKLELHRGGGRSRTSGSPGLQEFRKYFEELQPGDSLLTPRRTMTEADIVNFACLSGDHFYAHMDKIAAAESIFGERVVHGYFVLSAAAGLFVDAGVGPVIANYGLESLRFIEPVKPGADRRRQETHWRGGARYPIRPXEMR

SEQ ID NO: 484 - protein, 157 aa, Homo sapiens
LISAMAIAASFMRACHVCPLKKPAGCCKEQTMNIVDQQTFRDAMSCMGAAVNIITTDGPAGRAGFTASAVCSVTDTPPTLLVCLNRGASVWPAFNENRTLCVNTLSAGQEPLSNLFGGKTPMEHRFAAARWQTGLTDARNWKSSGFVYCRISQWLPS

SEQ ID NO: 485 - protein, 131 aa, Homo sapiens
  misc_feature (4): Xaa equals any of the naturally occurring L-amino acids
  misc_feature (30): Xaa equals any of the naturally occurring L-amino acids
MYLXRNSSSLIFLAQEIIGPWVTKFSAVFXKTEILEKFRKSAEHCDCLQCFFIIHSMGGGTGSGLGTFLLKVLEDEFPEVYRFVTSIYPSGEDDVITSPYNSILAMKELNEHADCVLPIDNQVRNDIGTYE

SEQ ID NO: 486 - protein, 301 aa, Homo sapiens
  misc_feature (12): Xaa equals any of the naturally occurring L-amino acids
  misc_feature (13): Xaa equals any of the naturally occurring L-amino acids
  misc_feature (17): Xaa equals any of the naturally occurring L-amino acids
  misc_feature (291): Xaa equals any of the naturally occurring L-amino acids
RPRDSKLPEPAXXTMTXSVVVQVGQCGNQIGCCFWDLALREHAAVNQKGIYDEAISSFFRNVDTRVVGDGGSISKGKICSLKARAVLIDMEEGVVNEILQGPLRDVFDTKQLITDISGSGNNWAVGHKVFGSLYQDQILEKFRKSAEHCDCLQCFFIIHSMGGGTGSGLGTFLLKVLEDEFPEVYRFVTSIYPSGEDDVITSPYNSILAMKELNEHADCVLPIDNQSLFDIISKIDLMVNSGKLGTTVKPKSLVTSSSGALKKQHKKPFDAMNNIVANLLLNLTSSARFEXSLIWTLMKSA

SEQ ID NO: 487 - protein, 142 aa, Homo sapiens
  misc_feature (94): Xaa equals any of the naturally occurring L-amino acids
WQTRDLNSGLHSQQKNMAQETNQTPGPMLCSTGCGFYGNPRTNGMCSVCYKEHLQRQQNSGRMSPMGTASGSNSPTSDSASVQRADTSLNNCEXAAGRHLKNQEMCLWCLACNSQMTEMSISREDKITTPKTEVSEPVVTQP

SEQ ID NO: 488 - protein, 255 aa, Homo sapiens
  misc_feature (5): Xaa equals any of the naturally occurring L-amino acids
  misc_feature (223): Xaa equals any of the naturally occurring L-amino acids
  misc_feature (232): Xaa equals any of the naturally occurring L-amino acids
TSWSXSDLFSRDQKSLLPPPNQSQLLEEFLDNFKKNTANDFSNVPDITTGLKRSQTDGTLDQVSHREKMEQTFRSAEQITALCRSFNDSQANGMEGPRENQDPPPRPLARHLSDADRLRKVIQELVDTEKSYVKDLSCLFELYLEPLQNETFLTQDEMESLFGSLPEMLEFQKVFLETLEDGISASSDFNTLETPSQFRKLLVSLGGSFLYYADHFKLYSGFXANHIKVQKXLERAKTDKAFKAFLGRPGTPPSK

SEQ ID NO: 489 - protein, 120 aa, Homo sapiens; identical to SEQ ID NO: 338
  misc_feature (54): Xaa equals any of the naturally occurring L-amino acids
  misc_feature (62): Xaa equals any of the naturally occurring L-amino acids
  misc_feature (111): Xaa equals any of the naturally occurring L-amino acids
  misc_feature (117): Xaa equals any of the naturally occurring L-amino acids

SEQ ID NO: 490 - protein, 180 aa, Homo sapiens
  misc_feature (154): Xaa equals any of the naturally occurring L-amino acids
  misc_feature (155): Xaa equals any of the naturally occurring L-amino acids
  misc_feature (169): Xaa equals any of the naturally occurring L-amino acids
  misc_feature (175): Xaa equals any of the naturally occurring L-amino acids
VNAGQVVTGNLAPHFLALCKPNYTALGCQQYTQFISGEEACTGNPDLIMRARKTFPSKEAALSVYAAMYLTMYITNTIKAKGTRLAKPVLCLGLMCLAFLTGLNRVAEYRNHWSDVIAGFLVGISIAVFLVVCVVNNFKGRQAENEHIHMDNLXXMPMISIPRVESPLXKNPITXFAEVT

SEQ ID NO: 491 - protein, 130 aa, Homo sapiens
  misc_feature (13): Xaa equals any of the naturally occurring L-amino acids
  misc_feature (22): Xaa equals any of the naturally occurring L-amino acids
  misc_feature (49): Xaa equals any of the naturally occurring L-amino acids
  misc_feature (94): Xaa equals any of the naturally occurring L-amino acids
  misc_feature (129): Xaa equals any of the naturally occurring L-amino acids
  misc_feature (130): Xaa equals any of the naturally occurring L-amino acids
PWSPRSLRTCGTXTTSCRWATXARLHHPQVQTESSTGSVGSNRVRTTLXLCVEAIDFDSQACQLRVKGTNIQENEYVKMGAYHTIELEPTASSXWPRSSGIVWYWSASSKLVTSLSADVALCHAEARHXX

SEQ ID NO: 492 - protein, 170 aa, Homo sapiens
  misc_feature (59): Xaa equals any of the naturally occurring L-amino acids
  misc_feature (121): Xaa equals any of the naturally occurring L-amino acids
  misc_feature (146): Xaa equals any of the naturally occurring L-amino acids
  misc_feature (164): Xaa equals any of the naturally occurring L-amino acids
  misc_feature (170): Xaa equals any of the naturally occurring L-amino acids
PRVRRNMAQETNHSQVPMLCSTGCGFYGNPRTNGMCSVCYKEHLQRQNSSNGRISPPAXSVSSLSESLPVQCTDGSVPEAQSALDSTSSSMQPSPVSNQSLLSESVASSQLDSTSGGQSSXWKQKMCRLQYQTQHSSHLKSKQVSXKPNKKIAVHGREMGLWVXPGGCSX

SEQ ID NO: 493 - protein, 203 aa, Homo sapiens
  misc_feature (73): Xaa equals any of the naturally occurring L-amino acids
  misc_feature (186): Xaa equals any of the naturally occurring L-amino acids
  misc_feature (190): Xaa equals any of the naturally occurring L-amino acids
  misc_feature (196): Xaa equals any of the naturally occurring L-amino acids
ESTIVSGACCRFSPPVRRLVRFLGVYSFGLFTTTIFANAGQVVTGNPTPHFLSVCRPNYTALGCLPPSPDRPXPDRFVTDQGACAGSPSLVAAARRAFPCKDAALCAYAVTYTAMYVTLVFRVKGSRLVKPSLCLALLCPAFLVGVVRVAEYRNHWSDVLAGFLTGAAIATFLVTCVVHNFQSRPXSGRXSLPGEXLGQAPHG

SEQ ID NO: 494 - protein, 234 aa, Homo sapiens; identical to SEQ ID NO: 345

SEQ ID NO: 495 - protein, 383 aa, Homo sapiens
  misc_feature (372): Xaa equals any of the naturally occurring L-amino acids
  misc_feature (375): Xaa equals any of the naturally occurring L-amino acids
  misc_feature (379): Xaa equals any of the naturally occurring L-amino acids
  misc_feature (382): Xaa equals any of the naturally occurring L-amino acids
RISITFDPFLYLPVPLPQKQKVLPVFYFAREPHSKPIKFLVSVSKENSTASEVLDSLSQSVHVKPENLRLAEVIKNRFHRVFLPSHSLDTVSPSDTLLCFELLSSELAKERVVVLEVQQRPQVPSVPISKCAACQRKQQSEDEKLKRCTRCYRVGYCNQLCQKTHWPDHKGLCRPENIGYPFLVSVPASRLTYARLAQLLEGYARYSVSVFQPPFQPGRMALESQSPGCTTLLSTGSLEAGDSERDPIQPPELQLVTPMAEGDTGLPRVWAAPDRGPVPSTSGISSEMLASGPIEVGSLPAGERVSRPEAAVPGYQHPSEAMNAHTPQFFIYKIDSSNREQRLEDKGDTPLELGDDCSLALVWRNNERLQEXLPXKIPXSVXV

SEQ ID NO: 496 - protein, 88 aa, Homo sapiens
  misc_feature (1): Xaa equals any of the naturally occurring L-amino acids
  misc_feature (3): Xaa equals any of the naturally occurring L-amino acids
  misc_feature (6): Xaa equals any of the naturally occurring L-amino acids
  misc_feature (15): Xaa equals any of the naturally occurring L-amino acids
XNXTKXLWKSSRTRXLARPPRWPPRGQPLNASPPLWIGQPPPTATWRRWISRSLADGGDWVWDTHTEGQLLAASPSLTQRTLALSVGS

SEQ ID NO: 497 - protein, 203 aa, Homo sapiens
  misc_feature (185): Xaa equals any of the naturally occurring L-amino acids
SERLRLGGGSNGGGGRLRAPGLRRSSSCPSSHIEGRKDNFGEKMASNNHWFQSSQVPSFAQMLKKNLPVQPATKTITTPTGWSSESYGLSKMASKVTQVTGNFPEPLLSKNLSSISNPVLPPKKIPKEFIMKYKRGEINPVSALHQFAQMQRVQLDLKETVTTGNVMGPYFAFCAVVDGIQYKTXLGQNKKESRSNAAKLALE

SEQ ID NO: 498 - protein, 146 aa, Homo sapiens
  misc_feature (46): Xaa equals any of the naturally occurring L-amino acids
  misc_feature (69): Xaa equals any of the naturally occurring L-amino acids
  misc_feature (140): Xaa equals any of the naturally occurring L-amino acids
  misc_feature (145): Xaa equals any of the naturally occurring L-amino acids
YFGCLRCPPAETQLLRRPAVFVGSAASGIRSGLWSASSGHWCAPAXGRAHAPVPRLVRGLGAASTAAPXDAQTGPQPMPRADCIMRHLPYFCRGQVVRGFGRGSKQLGIPTANFPEQVVDNLPADISTGIYYGWANVGSXDSIRXW

SEQ ID NO: 499 - protein, 200 aa, Homo sapiens
  misc_feature (30): Xaa equals any of the naturally occurring L-amino acids
  misc_feature (31): Xaa equals any of the naturally occurring L-amino acids
  misc_feature (156): Xaa equals any of the naturally occurring L-amino acids
WVPRKSFAIQITPERLALSCRMKKTSAPLXXPCAFTSIGKLHLCLFGEGGVNCAICWKTPFKNAWLKRLREGMPECVAAPKVRSSGSIEPSPSITLNYPRQSFDTAHFPVEEKAAIAQLRQFCQNGAGEYEQQRDFPAVEGTSRLSASLATGGLSXRQCLHRLLAEQRQAWDGGAGSVWLNELDLADFYRHLITYSPLVV

SEQ ID NO: 500 - protein, 107 aa, Homo sapiens
PLAWPRRVSALGVQRGSPNGAALTVRLHTQSVSECITEDGRTVAVGDIVWGKIHGFPWWPARVLDISLGQKEDGEPSWREAKVSWFGSPTTSSCLFQNSPLSLNFSN

SEQ ID NO: 501 - protein, 272 aa, Homo sapiens
  misc_feature (73): Xaa equals any of the naturally occurring L-amino acids
  misc_feature (74): Xaa equals any of the naturally occurring L-amino acids
  misc_feature (234): Xaa equals any of the naturally occurring L-amino acids
  misc_feature (237): Xaa equals any of the naturally occurring L-amino acids
  misc_feature (266): Xaa equals any of the naturally occurring L-amino acids
PTPSTGLTRVTARPRPPWLRSCSCTLPAEQAFWCLVQICDKYLPGYYSAGLEAIQLDGEIFFALLRRASPWRXXHLRRQRIDPVLYMTEWFMCIFARTLPWASVLRVWDMFFCEGVKIIFRVALVLLRHTLGSVEKLRSCQGMYETMEQLRNLPQQCMQEDFLVHEVTNLPVTEALIERENAAQLKKWRETRGELQYRPSRRLHGSRAIHEERRRQQPPLGPSSSLLSLPGLKXRAXGSWRGPVPAAPVRRASAGPAPRPVGHLLXGLHPSL

SEQ ID NO: 502 - protein, 146 aa, Homo sapiens
  misc_feature (116): Xaa equals any of the naturally occurring L-amino acids
  misc_feature (124): Xaa equals any of the naturally occurring L-amino acids
YVKGFDNAMELVKNMTERIPQFKSVVEEIQKQKICGSLTLQHHMLEPVQRIPRYEMLLKDYLRKLPPDSLDWNDAKKSLEIISTAASHSNSAIRKMENLKKLLEIYEMLGEEEDIXNPSNELIXEGQILKLAARNTSAQERYLFLF

SEQ ID NO: 503 - protein, 192 aa, Homo sapiens
  misc_feature (17): Xaa equals any of the naturally occurring L-amino acids
  misc_feature (111): Xaa equals any of the naturally occurring L-amino acids
GLKARYQTMSILPMELXKEFAEYVTNHYRMLCAVLEPALNVKGKEEVASALVHILQSTGKAKDFLSDMAMSEVDRFMEREHLIFRENTLATKAIEEYMRLIGQKYLKDAIXEFIRALYESEENCEVDPIKCTASSLAEHQANLRMCCELALCKVVNSHCLPSCSCGPSFPVSLTPVSTPSPPTTPLSMFPGS

SEQ ID NO: 504 - protein, 88 aa, Homo sapiens
LVGLQVVITVFDHRGVEAVKTAVKPHTLGHDVLQLTSGLVGAIVVAEAIHHLLILELVLVGNMVDDAILQQGLAQVDSFFRLADFTNF

SEQ ID NO: 505 - protein, 250 aa, Homo sapiens
  misc_feature (9): Xaa equals any of the naturally occurring L-amino acids
  misc_feature (220): Xaa equals any of the naturally occurring L-amino acids
  misc_feature (246): Xaa equals any of the naturally occurring L-amino acids
  misc_feature (247): Xaa equals any of the naturally occurring L-amino acids
RPPGSPSAXRLRLCVLNEILGTERDYVGTLRFLQSAFLHRIRQNVADSVEKGLTEENVKVLFSNIEDILEVHKDFLAALEYCLHPEPQSQHELGNVFLKFKDKFCVYEEYCSNHEKALRLLVELNKIPTVRAFLLSCMLLGGRKTTDIPLEGYLLSPIQRICKYPLLLKELAKRTPGKHPDHPAVQSALQAMKTVCSNINETKRQMEKLEPWSSCSPTSXAGEGSKLHRHFGISSSCRGLCLKNFXXGKI

SEQ ID NO: 506 - protein, 102 aa, Homo sapiens
  misc_feature (86): Xaa equals any of the naturally occurring L-amino acids
  misc_feature (102): Xaa equals any of the naturally occurring L-amino acids
HELVPNRHEKECEHCDCLQGFQLTHSLGGGTGSGMGTLLISKIREEFPDRIMNTFSVMPSPKVSDTVVEPYNATLSVHQLVENTDXTYCIDNEALYDIASAX

SEQ ID NO: 507 - protein, 248 aa, Homo sapiens
  misc_feature (48): Xaa equals any of the naturally occurring L-amino acids
RRPPGPPFGWRPPMLSATRRACQLLLLHSLFPVPRMGNSASNIVSPQXALPGRKEQTPVAAKHHVNGNRTVEPFPEGTQMAVFGMGCFWGAERKFWVLKGVYSTQVGFAGGYTSNPTYKEVCSEKTGHAEVVRVVYQPEHMSFEELLKVFWENHDPTQGMRQGNDHGTQYRSAIYPTSAKQMEAALSSKENYQKVLSEHGFGPITTDIREGQTFYYAEDYHQQYLSKNPNGYCGLGGTGVSCPVGIKK

SEQ ID NO: 508 - protein, 65 aa, Homo sapiens; identical to SEQ ID NO: 369

SEQ ID NO: 509 - protein, 262 aa, Homo sapiens
  misc_feature (17): Xaa equals any of the naturally occurring L-amino acids
  misc_feature (37): Xaa equals any of the naturally occurring L-amino acids
KVSADGMQSCESSGDSXDDPLSRGLRRRGQPRVVVIXAGLAGLAAAKALLEQGFTDVTVLEASSHIGGRVQSVKLGHATFELGATWIHGSHGNPIYHLAEANGLLEETTDGERSVGRISLYSKNGVACYLTNHGRRIPKDVVEEFSDLYNEVYNLTQEFFRHDKPVNAESQNSVGVFTREEVRNRIRNDPDDPEATKRLKLAMIQQYLKVESCESSSHSMDEVSLSAFGEWTEIPGAHHIIPSGFMRVVELLAEGIPATSSS

SEQ ID NO: 510 - protein, 373 aa, Homo sapiens
GKFDELDMSPGDPKWLDVIERDLHRQFPFHEMFVSRGGHGQQDLFRVLKAYTLYRPEEGYCQAQAPIAAVLLMHMPAEQAFWCLVQICEKYLPGYYSEKLEAIQLDGEILFSLLQKVSPVAHKHLSRQKIDPLLYMTEWFMCAFSRTLPWSSVLRVWDMFFCEGVKIIFRVGLVLLKHALGSPEKVKACQGQYETIERLRSLSPKIMQEAFLVQEVVELPVTERQIEREHLIQLRRWQETRGELQCRSPPRLHGAKAILDAEPGPRPALQPSPSIRLPLDAPLPGSKAKPKPPKQAQKEQRKQMKGRGQLEKPPAPNQAMVVAAAGDACPPQHVPPKDSAPKDSAPQDLAPQVSAHHRSQESLTSQESEDTYL

SEQ ID NO: 511 - protein, 320 aa, Homo sapiens
  misc_feature (19): Xaa equals any of the naturally occurring L-amino acids
  misc_feature (300): Xaa equals any of the naturally occurring L-amino acids
SCVSGTHSMDLVALAPFGXYTVLPGLDCTFSKGYQGLTNCMMAALPEDTVVFEKPVKTIHWNGSFQEAAFPGETFPVSVECEDGDRFPAHHVIVTVPLGFLREHLDTFFDPPLPAEKAEAIRKIGFGTNNKIFLEFEEPFWEPDCQLIQLVWEDTSPLEDAAPELQDAWFRKLIGFVVLPAFASVHVLCGFIAGLESEFMETLSDEEVLLCLTQVLRRVTGNPRLPAPKSVLRSRWHSAPYTRGSYSYVAVGSTGGDLDLLAQPLPADGAGAQLQILFAGEATHRTFYSTTHGALLSGWXEADRLLSLWAPQVQQPRPRL

SEQ ID NO: 512 - protein, 246 aa, Homo sapiens
  misc_feature (17): Xaa equals any of the naturally occurring L-amino acids
GSRSSERFCSPGKGRAXGSAALQVGDLLFSCPAYAYVLTVNERGNHCEYCFTRKEGLSKCGRCKQAFYCNVECQKEDWPMHKLECSPMVVFGENWNPSETVRLTARILAKQKIHPERTPSEKLLAVKEFESHLDKLDNEKKDLIQSDIAALHHFYSKHLEFPDNDSLVVLFAQVNCNGFTIEDEELSHLGSAIFPDVALMNHSCCPNVIVTYKGTRAEVRAVQEIKPGEEVFTSYIDLLYPTEDRK

SEQ ID NO: 513 - protein, 46 aa, Homo sapiens
  misc_feature (15): Xaa equals any of the naturally occurring L-amino acids
  misc_feature (17): Xaa equals any of the naturally occurring L-amino acids
  misc_feature (28): Xaa equals any of the naturally occurring L-amino acids
AITAKRSIRASSDVXRXLCGTTAIEWTXCRQVVEALGYGGADEHES

SEQ ID NO: 514 - protein, 249 aa, Homo sapiens
  misc_feature (2): Xaa equals any of the naturally occurring L-amino acids
  misc_feature (5): Xaa equals any of the naturally occurring L-amino acids
  misc_feature (8): Xaa equals any of the naturally occurring L-amino acids
  misc_feature (13): Xaa equals any of the naturally occurring L-amino acids
  misc_feature (37): Xaa equals any of the naturally occurring L-amino acids
LXDLXLIXTTVPXMAFNYLSGSKSISMAGCATQIFFXTSLLGSECFLLAVMAYDRYTAICHPLRYTNLMSPKICGLMTAFSWILGSTDGIIYAVATFSFSYCGSREIAHFFCELPSLLILSCNDTSIFEKVIFICSIVMLVFPVAIIIASYAGVILAVIHMGSGEGRRKAFTTCSSHLMVVGMFYGAGLFMYIQPTSDRSPTQDKLVSVFYTILTPMLNPLIYSLRNKEVTRAFMKISGKGKSGERVTS

SEQ ID NO: 515 - protein, 105 aa, Homo sapiens
  misc_feature (98): Xaa equals any of the naturally occurring L-amino acids
  misc_feature (105): Xaa equals any of the naturally occurring L-amino acids
HVHFATTHSLSPRGLGTSGATAGITVRREMPAPAPSPLAATAIPPMVPHPALPTSLSLQPQVPPSWMLLAPGDSFPVTAVERVSRTNWTHGVTVCTRXSRHPAPX

SEQ ID NO: 516 - protein, 678 aa, Homo sapiens
  misc_feature (20): Xaa equals any of the naturally occurring L-amino acids
  misc_feature (21): Xaa equals any of the naturally occurring L-amino acids
  misc_feature (26): Xaa equals any of the naturally occurring L-amino acids
  misc_feature (30): Xaa equals any of the naturally occurring L-amino acids
  misc_feature (134): Xaa equals any of the naturally occurring L-amino acids
  misc_feature (576): Xaa equals any of the naturally occurring L-amino acids
APRGGGRSRTSGSPGLQEFXXRKHSXIYPXPEELEAVQNMVSTVECALKHVSDWLDETNKGTKTEGETEVKKDEAGENYSKDQGGRTLCGVMRIGLVAKGLLIKDDMDLELVLMCKDKPTETLLNTVKDNLPIXIQKLTEEKYQVEQCVNEASIIIRNTKEPTLTLKVILTSPLIRDELEKKDGENVSMKDPPDLLDRQKCLNALASLRHAKWFQARANGLKSCVIVLRILRDLCNRVPTWAPLKGWPLELICEKSIGTCNRPLGAGEALRRVMECLASGILLPGGPGLHDPCERDPTDALSYMTIQQKEDITHSAQHALRLSAFGQIYKVLEMDPLPSSKPFQKYSWSVTDKEGAGSSALKRPFEDGLGDDKDPNKKMKRNLRKILDSKAIDLMNALMRLNQIRPGLQYKLLSQSGPVHAPVFTMSVDVDGTTYEASGPSKKTAKLHVAVKVLQAMGYPTGFDADIECMSSDEKSDNESKNETVSSNSSNNTGNSTTETSSTLEVRTQGPILTASGKNPVMELNEKRRGLKYELISETGGSHDKRFVMEVEVDGQKFRGAGPNKKVAKASAALAXLEKLFSGPNAANNKKKKIIPQAKGVVNTAVSAAVQAVRGRGRGTLTRGAFVGATAAPGYIAPGYGTPYGYSTAAPAYGLPKRMVLLPVMKFPTYPVPHYSFF

SEQ ID NO: 517 - protein, 72 aa, Homo sapiens
LYSHSGQFHFLSSVVLTGDPSVGEVLPFNIEMISITNAMYLENPNKEVLGWCITLFLKFSLSEQMEGEYYLD

SEQ ID NO: 518 - protein, 68 aa, Homo sapiens
  misc_feature (59): Xaa equals any of the naturally occurring L-amino acids
LPFPHQHSIIECMLHFYEWQVFIIICIDLKSFFLMMLIVFCIHGRIAHLTVFAFLCMSXVSYDCATYI

SEQ ID NO: 519 - protein, 179 aa, Homo sapiens
  misc_feature (141): Xaa equals any of the naturally occurring L-amino acids
  misc_feature (151): Xaa equals any of the naturally occurring L-amino acids
  misc_feature (155): Xaa equals any of the naturally occurring L-amino acids
IFLCTYRAFTTTQQVLDLLFKRYGRCDALTASSRYGCILPYSDEDGGPQDQLKNAISSILGTWLDQYSEDFCQPPDFPCLKQLVAYVQLNMPGSDLERRAHLLLAQLEHSEPIEAEPEALSPVPALKPTPELELTLTPARXPSQCRLQPRXQNQXQHNFKFKTKITPHRSGIPQGPKQL

SEQ ID NO: 520 - protein, 215 aa, Homo sapiens
  misc_feature (33): Xaa equals any of the naturally occurring L-amino acids
  misc_feature (140): Xaa equals any of the naturally occurring L-amino acids
  misc_feature (167): Xaa equals any of the naturally occurring L-amino acids
  misc_feature (176): Xaa equals any of the naturally occurring L-amino acids
  misc_feature (190): Xaa equals any of the naturally occurring L-amino acids
  misc_feature (204): Xaa equals any of the naturally occurring L-amino acids
DIRNCKSKEAEIKRINKELANIRSKFKGDKALXGYSKKKYVCKLLFIFLLGHDIDFGHMEAVNLLSSNKYTEKQIGYLFISVLVNSNSELIRLINNAIKNDLASRNPTFMCLALHCIANVGSREMGEAFAADIPRILVAXDSMDSVKQSAALCLLRLYKASPDLVPXGEWTARVVXLLNDQHMGVVTAAXSLITCLCKKNPDDXKTCVSLAVSRL

SEQ ID NO: 521 - protein, 192 aa, Homo sapiens
  misc_feature (108): Xaa equals any of the naturally occurring L-amino acids
  misc_feature (150): Xaa equals any of the naturally occurring L-amino acids
  misc_feature (189): Xaa equals any of the naturally occurring L-amino acids
  misc_feature (190): Xaa equals any of the naturally occurring L-amino acids
RMGVNDLWQILEPVKQHIPLRNLGGKTIAVDLSLWVCEAQTVKKMMGSVMKPHLRNLFFRISYLTQMDVKLVFVMEGEPPKLKADVISKRNQTRYGSSGKSWSQKTGXSHFKSVLRECLHMLECLGIPWVQAAGEAEAMCAYLNAGGHVXGCLTNDGDTFLYGAQTVYRNFTMNTKDPHVDCYTMSSIXXKL

SEQ ID NO: 522 - protein, 274 aa, Homo sapiens
  misc_feature (67): Xaa equals any of the naturally occurring L-amino acids
HIQQYSDIEDFRQATAASSVMVARAAMWNPSIFLKEGLRPLEEVMQKYIRYAVQYDNHYTNTKYCLXQMLREQLESPQGRLLHAAQSSREICEAFGLGAFYEETTQELDAQQARLSAKTSEQTGEPAEDTSGVIKMAVKFDRRAYPAQITPKMCLLEWCRREKLAQPVYETVQRPLDRLFSSIVTVAEQKYQSTLWDKSKKLAEQAAAIVCLRSQGLPEGRLGEESPSLHKRKREAPDQDPGGPRAQELAQPGDLCKKPFVALGSGEESPLEGW

SEQ ID NO: 523 - protein, 190 aa, Homo sapiens; identical to SEQ ID NO: 395

SEQ ID NO: 524 - protein, 164 aa, Homo sapiens
PHTTRSRRDQEVAGRDYHFVSRQAFEADIAAGKFIEHGEFEKNLYGTSIDSVRQVINSGKICLLSLRTQSLKTLRNSDLKPYIIFIAPPSQERLRALLAKEGKNPKPEELREIIEKTREMEQNNGHYFDTAIVNSDLDKAYQELLRLINKLDTEPQWVPSTWLR

SEQ ID NO: 525 - protein, 119 aa, Homo sapiens
NRICVLDVDLQGVRNIKATDLRPIYISVQPPSLHVLVCAGQGWGLGARACQALIATPFLGAAAAAGNTETEESLVKRLAAAQADMESSECAVGSPGNARRGVRVLRSVAPGTLWVPEPS

SEQ ID NO: 526 - protein, 81 aa, Homo sapiens
  misc_feature (7): Xaa equals any of the naturally occurring L-amino acids
DTQLCGXGRGTSQRPASTCFHPWGMTTQLGPALVLGVALCLGCGQPLPQVPERPFSVLWNVPSAHCEARFGVHLPLNALGS

SEQ ID NO: 527 - protein, 218 aa, Homo sapiens
  misc_feature (145): Xaa equals any of the naturally occurring L-amino acids
PFTMGSSRLRVFDPHLERKDSAAALSDRELPLPTFDVPYFKYIDEEDEDDEWSSRSQSSTEDDSVDSLLSDRYVVVSGTPEKILEHLLNDLHLEEVQDKETETLLDDFLLTYTVFMTTDDLCQALLRHYSAKKYQGKEENSDVPXRKRKVLHLVSQWIALYKDWLPEDEHSKMFLKTIYRNVLDDVYEYPILEKELKEFQKILGMHRRHTVDEYSPQK

SEQ ID NO: 528 - protein, 114 aa, Homo sapiens
GTSWELGPRSGPEMAAADGALPEGGFRATRGLPASVRASIERKRQRALMLRQARLAARPYSATAAAATGGMANVKAAPKIIDTGGGFILEEEEEEEQKIGKLFINQDLLWNLIM

SEQ ID NO: 529 - protein, 260 aa, Homo sapiens
  misc_feature (48): Xaa equals any of the naturally occurring L-amino acids
  misc_feature (122): Xaa equals any of the naturally occurring L-amino acids
  misc_feature (159): Xaa equals any of the naturally occurring L-amino acids
SEKCWQNAAAASPGGDVNPIPLRAVRGVYRLLLPPVWLPPLAPALASXLAPVPQAPQGRQWPEEMVGSFQTLSQCGNEADSGQAGPYENWMLEPALATGEELPELTLLTTLLEGPGDKTQPXEEETLSQAPESEEEQKKKALERSMYVLSELVETETMXVDDLGHIVEGYMATMAAQGVPESLRGRDRIVFGNIPQIYEWHRDYFLQELQRCLTDPDWLAQLFIKHERRLHMYVVYCHWINRPLVTSPRLPMTLLQSLQL

SEQ ID NO: 530 - protein, 148 aa, Homo sapiens
  misc_feature (32): Xaa equals any of the naturally occurring L-amino acids
PAVDGVRRRNTVLPLTLWPLPGGLTRSVFGLXREILTAQTLKIRAEILSHFVKIAKKLLELNNLHSLMSVVSALQSAPIFRLTKTWALLNRKDKTTFEKLDYLMSKEDNYKRTREYIRSLKMVPSIPYLGIQLLCVWQSCEEARVARD

SEQ ID NO: 531 - protein, 142 aa, Homo sapiens
  misc_feature (41): Xaa equals any of the naturally occurring L-amino acids
  misc_feature (136): Xaa equals any of the naturally occurring L-amino acids
KKSPTRPKRQAKPAADEGFWDCSVCTFRNSAEAFKCSICDXRKGTSTRKPRINSQLVAQQVAQQYATPPPPKKEKKEKVEKQDKEKPEKDKEISPSVTKKNTNKKTKPKSDILKILLVKQTAYSLQMLQQRPAKQXTPQGPG

SEQ ID NO: 532 - protein, 181 aa, Homo sapiens
  misc_feature (123): Xaa equals any of the naturally occurring L-amino acids
  misc_feature (141): Xaa equals any of the naturally occurring L-amino acids
  misc_feature (146): Xaa equals any of the naturally occurring L-amino acids
  misc_feature (156): Xaa equals any of the naturally occurring L-amino acids
  misc_feature (159): Xaa equals any of the naturally occurring L-amino acids
  misc_feature (164): Xaa equals any of the naturally occurring L-amino acids
  misc_feature (177): Xaa equals any of the naturally occurring L-amino acids
SHEEAPGEGPIIKEISDLMLARFDGPAREELQQVAAQFCSYQSIALELIKTKQRKESRFQLFMQEAESHPQCRRLQLRDLIISEMQRLTKYPLLLESIIKHTEGGTSEHEKLCRARDQCREIXKYVNEAVKQTENRHRLRXLPETXGCHRLERASXPLXADSRXGSYNQKMIHEGPXTGSS

SEQ ID NO: 533 - protein, 136 aa, Homo sapiens
  misc_feature (120): Xaa equals any of the naturally occurring L-amino acids
PTRPRVPNSNPPEYEFFWGLRSYYETSKMKVLKFACKLQSSQEPEAPPPRDVALLQGRANDLVKYLLAKDQTKIPIKRSDMLKDIIKEYTDVYPEIIERAGYSLEKVFGDSLKEIDKMTXVHSSQHLEPMMQAWED

SEQ ID NO: 534 - protein, 78 aa, Homo sapiens [sequence omitted]

SEQ ID NO: 535 - protein, 105 aa, Homo sapiens
  misc_feature (15): Xaa equals any of the naturally occurring L-amino acids
ASKQWGIPQLRAPGXQQDERLASPIHSTYIPIPTSAICATGSNGSAPTRISVQCLSPATTGSASVDLCCTRDISLLPGEPPIAVPTGVFGPLPTGVSVCYLISQA

SEQ ID NO: 536 - protein, 131 aa, Homo sapiens
  misc_feature (67): Xaa equals any of the naturally occurring L-amino acids
  misc_feature (107): Xaa equals any of the naturally occurring L-amino acids
  misc_feature (116): Xaa equals any of the naturally occurring L-amino acids
  misc_feature (130): Xaa equals any of the naturally occurring L-amino acids
LRPEHQNAEPEPRSLSLGGHVGFDSLPDQLVSKSVTQGFSFNILCVGETGIGKSTLMNTLFNTTFEXEEASHHEACVRLRPQTYDLQESNVQLKLTIVDAVGFGDQXNKDESYRPXVDYIDAHLKLFCRXS

SEQ ID NO: 537 - protein, 294 aa, Homo sapiens
  misc_feature (2): Xaa equals any of the naturally occurring L-amino acids
  misc_feature (92): Xaa equals any of the naturally occurring L-amino acids
  misc_feature (124): Xaa equals any of the naturally occurring L-amino acids
  misc_feature (247): Xaa equals any of the naturally occurring L-amino acids
  misc_feature (253): Xaa equals any of the naturally occurring L-amino acids
EXDYATNTQDEEETKKEESLKSPLKPESQLDLRVQELIKLICNVQAMEEMMMEMKYNTKKAPLGKLTVAQIKAGYQSLKKIEDCIRAGQHGXALMEACNEFYTRIPHDFGLRTPPLIRTQKELXEKIQLLEALGDIEIAIKLVKTELQSPEHPLDQHYRNLHCALRPLDHESYEFKVISQYLQSTHAPTHSDYTMTLLDLFEVEKDGEKEAFREDLHNRMLLWHGSRMSNWVGILSHGLRIAPPEAXITGYMXGKGIYFADMSSKSANYCFASRLKNTGLLLLSEVRQEYVCDL

SEQ ID NO: 538 - protein, 227 aa, Homo sapiens
WVPRAAEFGHESLRPLDHESYEFKVISQYLQSTHAPTHSDYTMTLLDLFEVEKDGEKEAFREDLHNRMLLWHGSRMSNWVGILSHGLRIAPPEAPITGYMFGKGIYFADMSSKSANYCFASRLKNTGLLLLSEVALGQCNELLEANPKAEGLLQGKHSTKGLGKMAPSSAHFVTLNGSTVPLGPASDTGILNPDGYTLNYNEYIVYNPNQVRMRYLLKVQFNFLQLW

SEQ ID NO: 539 - protein, 230 aa, Homo sapiens
GTRLSIPITSNTLIYYHPHPEDIKFHLYLVPSDALLTKAIDDEEDRFHGVRLQTSPPMEPLNFGSSYIVSNSANLKVMPKELKLSYRSPGEIQHFSKFYAGQMKEPIQLEITEKRHGTLVWDTEVKPVDLQLVAASAPPPFSGAAFVKENHRQLQARMGDLKGVLDDLQDNEVLTENEKELVEQEKTRQSKNEALLSMVEKKGDLALDVLFRSISERDPYLVSYLRQQNL

SEQ ID NO: 540 - protein, 269 aa, Homo sapiens
  misc_feature (4): Xaa equals any of the naturally occurring L-amino acids
  misc_feature (165): Xaa equals any of the naturally occurring L-amino acids
VSLXLGDLVWGKLGRYPPWPGKIVNPPKDLKKPRGKKCFFVKFFGTEDHAWIKVEQLKPYHAHKEEMIKINKGKRFQQAVDAVEEFLRRAKGKDQTSSHNSSDDKNRRNSSEERSRPNSGDEKRKLSLSEGKVKKNMGEGKKRVSSGSSERGSKSPLKRAQEQSXRKRGRPPKDEKDLTIPESSTVKGMMAGPMAAFKWQPTASEPVKDADPHFHHFLLSQTEKPAVCYQAITKKLKICEEETGSTSIQAADSTAVNGSITPTDKKIGF

SEQ ID NO: 541 - protein, 390 aa, Homo sapiens; identical to SEQ ID NO: 418

SEQ ID NO: 542 - protein, 146 aa, Homo sapiens; identical to SEQ ID NO: 419
  misc_feature (134): Xaa equals any of the naturally occurring L-amino acids
  misc_feature (140): Xaa equals any of the naturally occurring L-amino acids
  misc_feature (142): Xaa equals any of the naturally occurring L-amino acids

SEQ ID NO: 543 - protein, 164 aa, Homo sapiens
  misc_feature (129): Xaa equals any of the naturally occurring L-amino acids
  misc_feature (142): Xaa equals any of the naturally occurring L-amino acids
SSAPNAVAFTRRFNHVSFWVVREILHAQTLKIRAEVLSHYIKTAKKLYELNNLHALMAVVSGLQSAPIFRLTKTWALLSRKDKTTFEKLEYVMSKEDNYKRLRDYISSLKMTPCIPYLGIYLSDLTYIXSAYPSTGSILENXQRSKFKWVNILRIISDFTAVLV

SEQ ID NO: 544 - protein, 202 aa, Homo sapiens
  misc_feature (8): Xaa equals any of the naturally occurring L-amino acids
  misc_feature (15): Xaa equals any of the naturally occurring L-amino acids
  misc_feature (20): Xaa equals any of the naturally occurring L-amino acids
  misc_feature (184): Xaa equals any of the naturally occurring L-amino acids
  misc_feature (194): Xaa equals any of the naturally occurring L-amino acids
  misc_feature (198): Xaa equals any of the naturally occurring L-amino acids
CIVPCGCXPCGCSGXIGPLXPKQGVKSDDSISKIIYTGAKLLIFSICEQMGFPTRSPSAWKRKRNWRVESQQKSTCFSEDLVAEQLTYMDAQLFKKVVPHHCLGCIWSRRDKKENKHLAPTIRATISQFNTLTKCVVSTILGGKELKTQQRAKIIEKWINIAHECRLLKNFSSLRAIVSALQSXSIYRLKKTWXAVPXGPNA

SEQ ID NO: 545 - protein, 374 aa, Homo sapiens
  misc_feature (64): Xaa equals any of the naturally occurring L-amino acids
  misc_feature (98): Xaa equals any of the naturally occurring L-amino acids
  misc_feature (121): Xaa equals any of the naturally occurring L-amino acids
  misc_feature (140): Xaa equals any of the naturally occurring L-amino acids
  misc_feature (300): Xaa equals any of the naturally occurring L-amino acids
  misc_feature (314): Xaa equals any of the naturally occurring L-amino acids
KQGRLCVGVGMATMAAQGVPESLRGRDRIVFGNILQIYEWHRDYFLQELQRCLKDPDWLAQLFXKHELRQQLGHRLQLNDLLIKPVQRIMKYQLLLKXFLKYYNRAGMDTADLEQAVEVMXFVPKRCNDMMTLGRLRGFXGKLTAQGKLLGQDTFWVTEPEAGGLLSSRGRERRVFLFEQIIIFSEALGGGVRGGTQPGYVYKNSIKVSCLGLEGNLQGDPCRFALTSRGPEGGIQRYVLQAADPAISQAWIKHVAQILESQRDFLNALQSPIEYQRRESQTNSLGRPRGPGVGSPGRIXLGDQAQGSTHTPIXGSLPSLLLSPKGEVARALLPLDKQALGDIPQAPHDSPPVSPTPKTPPCQARLAKLDEDEL

SEQ ID NO: 546 - protein, 328 aa, Homo sapiens
  misc_feature (90): Xaa equals any of the naturally occurring L-amino acids
AGPCLVCKARGLVGGWLGSPRCLATRATECKTESLYVTSAHADLTCFDVCVMLKYAICNLSWAKSGAQQERHGRGLSAAIRFRTEAQRSXAKSSYLATEPIITTATPAAATVSATSKMCPGNWLWASMTFMARFSRSSSRSPVRTRGTLEEMPTVQHPFLNVFELERLLYTGKTACNHADEVWPGLYLGDQDMANNRRELRRLGITHVLNASHSRWRGTPEAYEGLGIRYLGVEAHDSPAFDMSIHFQTAADFIHRALSQPGGKILVHCAVGVSRSATLVLAYLMLYHHLTLVEAIKKVKDHRGIIPNRGFLRQLLALDRRLRQGLEA

SEQ ID NO: 547 - protein, 192 aa, Homo sapiens
PTALMTAPSCAFPVQFRQPSVSGLSQITKSLYISNGVAANNKLMLSSNQITMVINVSVEVVNTLYEDIQYMQVPVADSPNSRLCDFFDPIADHIHSVEMKQGRTLLHCAAGVSRSAALCLAYLMKYHAMSLLDAHTWTKSCRPIIRPNSGFWEQLIHYEFQLFGKNTVHMVSSPVGMIPDIYEKEVRLMIPL

SEQ ID NO: 548 - protein, 240 aa, Homo sapiens
ISSKKKKKMMYLTTRNAEFDRHEIQIYEEVAKMPPFQRKTLVLIGAQGVGRRSLKNRFIVLNPTRFGTTVPFTSRKPREDEKDGQAYKFVSRSEMEADIKAGKYLEHGEYEGNLYGTKIDSILEVVQTGRTCILDVNPQALKVLRTSEFMPYVVFIAAPELETLRAMHKAVVDAGITTKLLTDSDLKKTVDESARIQRAYNHYFDLIIINDNLDKAFEKLQTAIEKLRMEPQWVPISWVY

SEQ ID NO: 549 - protein, 183 aa, Homo sapiens
CLSQDTGQLFAHQPQLCVQLRNMAQETNHSQVPMLCSTGCGFYGNPRTNGMCSVCYKEHLQRQNSSNGRISPPATSVSSLSESLPVQCTDGSVPEAQSALDSTSSSMQPSPVSNQSLLSESVASSQLDSTSVDKAVPETEDVQASVSDTAQQPSEEQSKSLEKPKQKKNRWFMCRKESGTYWV

SEQ ID NO: 550 - protein, 208 aa, Homo sapiens
  misc_feature (186): Xaa equals any of the naturally occurring L-amino acids
  misc_feature (191): Xaa equals any of the naturally occurring L-amino acids
YSRFTVPLPATMASSEVARHLLFQSHMATKTTCMSSQGSDDEQIKRENIRSLTMSGHVGFESLPDQLVNRSIQQGFCFNILCVGETGIGKSTLIDTLFNTNFEDYESSHFCPNVKLKAQTYELQESNVQLKLTIVNTVGFGDQINKEESYQPIVDYIDAQFEAYLQEELKIKRSLFTYHDSRIHVXLYFIXPTGHSLKTLDLLNHEEP

SEQ ID NO: 551 - protein, 52 aa, Homo sapiens
HEDIFDIIDREADGSDSLELQNSSRVIKGFVLCHSIRWGYGFWAGGSYLLGA

SEQ ID NO: 552 - protein, 220 aa, Homo sapiens
ADAWAASAGADGSPLRRAGMAATALLEAGLARVLFYPTLLYTLFRGKVPGRAHRDWYHRIDPTVLLGALPLRSLTRQLVQDENVRGVITMNEEYETRFLCNSSQEWKRLGVEQLRLSTVDMTGIPTLDNLQKGVQFALKYQSLGQCVYVHCKAGRSRSATMVAAYLIQVHKWSPEEAVRAIAKIRSYIHIRPGQLDVLKEFHKQITARATKDGTFVISKT

SEQ ID NO: 553 - protein, 71 aa, Homo sapiens
GNVTLNPDPSETKSILYLSQEELWELLEREARGEVKVTPWLRTIAERFLYRWWPHLDDVTPFVELHKIHRV

SEQ ID NO: 554 - protein, 308 aa, Homo sapiens
  misc_feature (12): Xaa equals any of the naturally occurring L-amino acids
  misc_feature (150): Xaa equals any of the naturally occurring L-amino acids
  misc_feature (182): Xaa equals any of the naturally occurring L-amino acids
  misc_feature (190): Xaa equals any of the naturally occurring L-amino acids
DAQFEAYLQEEXKIKRSLFNYHDTRIHACLYFIAPTGHSLKSLDLVTMKKLDSKVNIIPIIAKADTIAKNELHKFKSKIMSELVSNGVQIYQFPTDEETVAEINATMSVHLPFAVVGSTEEVKIGNKMAKARQYPWGVVQVENENHCDFXKLREMLIRVNMEDLREQTHTRHYELYRRCNLXEMGFKDTXPDSKPFSLQETYEAKRNEFLGELQKKEEEMRQMFVMRVKEKEAELKEAEKELHEKFDLLKRTHQEEKKKVEDKKKELEEEVNNFQKKKAAAQLLQSQAQQSGAQQTKKDKDKKNASFT

SEQ ID NO: 555 - protein, 330 aa, Homo sapiens
  misc_feature (179): Xaa equals any of the naturally occurring L-amino acids
LRVAVLVAFKMSTKNFRVSDGDWICPDKKCGNVNFARRTSCNRCGREKTTEAKMMKAGGTEIGKTLAEKSRGLFSANDWQCKTCSNVNWARRSECNMCNTPKYAKLEERTGYGGGFNERENVEYIEREESDGEYDEFGRKKKKYRGKAVGPASILKEVEDKESEGEEEDEDEDLSKYKXDEDEDEDDADLSKYNLDASEEEDSNKKKSNRRSRSKSRSSHSRSSSRSSSPSSSRSRSRSRSRSSSSSQSRSRSSSRERSRSRGSKSRSSSRSHRGSSSPRKRSYSSSSSSPERNRKRSRSRSSSSGDRKKRRTRSRSPESQVIGENTKQP

SEQ ID NO: 556 - protein, 92 aa, Homo sapiens
  misc_feature (3): Xaa equals any of the naturally occurring L-amino acids
  misc_feature (4): Xaa equals any of the naturally occurring L-amino acids
ARXXYVFQVQAMNSAGLGQPSMPTDPVLLEDKPGAHEIEVGVDEEGFIYLAFEAPEAPDSSEFQWSKDYKGPLDPQRVKIEDKVNKSKVILK

SEQ ID NO: 557 - protein, 173 aa, Homo sapiens
  misc_feature (154): Xaa equals any of the naturally occurring L-amino acids
MPQPGPPYDVRASEVRATSLVLQWEPPLYMGAGPVTGYHVSFQEEGSEQWKPVTPGPISGTHLRVSDLQPGKSYVFQVQAMNSAGLGQPSMPTDPVLLEDKPGAHEIEVGVDEEGFIYLAFEAPEAPDSSEFQWSKDYKGPLDPQRVKIEDKVXKSKVILKEPASRIWAPTQS

SEQ ID NO: 558 - protein, 222 aa, Homo sapiens; identical to SEQ ID NO: 446

SEQ ID NO: 559 - protein, 259 aa, Homo sapiens; identical to SEQ ID NO: 447
  misc_feature (218): Xaa equals any of the naturally occurring L-amino acids
  misc_feature (223): Xaa equals any of the naturally occurring L-amino acids
  misc_feature (226): Xaa equals any of the naturally occurring L-amino acids
  misc_feature (254): Xaa equals any of the naturally occurring L-amino acids
  misc_feature (256): Xaa equals any of the naturally occurring L-amino acids

SEQ ID NO: 560 - protein, 144 aa, Homo sapiens
EFEEIVQIVLQKSLQECLGQCLVWVQCSFPNCGKWRRLCGNIDPSVLPDNWSCDQNTDVQYNRCDIPEETWTGLESDVAYASYIPGSIIWAKQYGYPWWPGMIESDPDLGEYFLFTSHLDSLPSKYHVTFFGEQFLVHGSQSTC

SEQ ID NO: 561 - protein, 157 aa, Homo sapiens; identical to SEQ ID NO: 451
  misc_feature (5): Xaa equals any of the naturally occurring L-amino acids
  misc_feature (7): Xaa equals any of the naturally occurring L-amino acids

SEQ ID NO: 562 - protein, 233 aa, Homo sapiens
  misc_feature (14): Xaa equals any of the naturally occurring L-amino acids
IRHRAGLLRPHHAXLAIEIGVRALLFGVFVFTEFLDPFQRVIQPEEIWLYKNPLVQSDNIPTRLMFAISFLTPLAVICVVKIIRRTDKTEIKEAFLAVSLALALNGVCTNTIKLIVGRPRPDFFYRCFPDGVMNSEMHCTGDPDLVSEGRKSFPSIHSSFAFSGLGFTTFYLAGKLHCFTESGRGKSWRLCAAILPLYCAMMIALSRMCDYKHHWQDSFVGGASAHFCIHLLQ

SEQ ID NO: 563 - protein, 90 aa, Homo sapiens
ARQYPWGTVQVENEAHCDFVKLREMLIRVNMEDLREQTHTRHYELYRRCKLEEMGFKDTDPDSKPFSLQETYEAKRNEFLGELQKKKKKM

SEQ ID NO: 564 - protein, 478 aa, Homo sapiens
  misc_feature (10): Xaa equals any of the naturally occurring L-amino acids
REQKLELHRXGGRSRTSGSPGLQEFGTSSSVSCAVAPVAAAPVAALADAGAMAATDIARQVGEGCRTVPLAGHVGFDSLPDQLVNKSVSQGFCFNILCVGETGLGKSTLMDTLFNTKFEGEPATHTQPGVQLQSNTYDLQESNVRLKLTIVSTVGFGDQINKEDSYKPIVEFIDAQFEAYLQEELKIRRVLHTYHDSRIHVCLYFIAPTGHSLKSLDLVTMKKLDSKVNIIPIIAKADAISKSELTKFKIKITSELVSNGVQIYQFPTDDESVAEINGTMNAHLPFAVIGSTEELKIGNKMMRARQYPWGTVQVENEAHCDFVKLREMLIRVNMEDLREQTHTRHYELYRRCKLEEMGFKDTDPDSKPFSLQETYEAKRNEFLGELQKKEEEMRQMFVQRVKEKEAELKEAEKELHEKFDRLKKLHQDEKKKLEDKKKSLDDEVNAFKQRKTAAELLQSQGSQAGGSQTLKRDKEKKK

SEQ ID NO: 565 - protein, 367 aa, Homo sapiens
GTSSSVSCAVAPVAAAPVAALADAGAMAATDIARQVGEGCRTVPLAGHVGFDSLPDQLVNKSVSQGFCFNILCVGETGLGKSTLMDTLFNTKFEGEPATHTQPGVQLQSNTYDLQESNVRLKLTIVSTVGFGDQINKEDSYKPIVEFIDAQFEAYLQEELKIRRVLHTYHDSRIHVCLYFIAPTGHSLKSLDLVTMKKLDSKVNIIPIIAKADAISKSELTKFKIKITSELVSNGVQIYQFPTDDESVAEINGTMNAHLPFAVIGSTEELKIGNKMMRARQYPWGTVQVENEAHCDFVKLREMLIRVNMEDLREQTHTRHYELYRRCKLEEMGFKDTDPDSKPFSLQETYEAKRNEFLGELQKKKKK

SEQ ID NO: 566 - protein, 427 aa, Homo sapiens
PGLTMLVLFETSVGYAIFKVLNEKKLQEVDSLWKEFETPEKANKIVKLKHFEKFQDTAEALAAFTALMEGKINKQLKKVLKKIVKEAHEPLAVADAKLGGVIKEKLNLSCIHSPVVNELMRGIRSQMDGLIPGVEPREMAAMCLGLAHSLSRYRLKFSADKVDTMIVQAISLLDDLDKELNNYIMRCREWYGWHFPELGKIISDNLTYCKCLQKVGDRKNYASAKLSELLPEEVEAEVKAAAEISMGTEVSEEDICNILHLCTQVIEISEYRTQLYEYLQNRMMAIAPNVTVMVGELVGARLIAHAGSLLNLAKHAASTVQILGAEKALFRALKSRRDTPKYGLIYHASLVGQTSPKHKGKISRMLAAKTVLAIRYDAFGEDSSSAMGVENRAKLEARLRTLEDRGIRKISGTGKALAKTEKYEHKR

SEQ ID NO: 567 - protein, 102 aa, Homo sapiens
FSLILCKHSIGDRKNYASAKLSELLPEEVEAEVKAAAEISMGTEVSEEDICNILHLCTQVIEISEYRTQLYEYLQNRMMAHCTQCYSMVGELSWSTAYCSCR

SEQ ID NO: 568 - protein, 141 aa, Homo sapiens
  misc_feature (140): Xaa equals any of the naturally occurring L-amino acids
  misc_feature (141): Xaa equals any of the naturally occurring L-amino acids
STHASEAQQYLMDNPTFAEDEELQNMDKEDALICFEEHIRALEKEEEEEKQKSLLRERRRQRKNRESFQIFLDELHEHGQLHSMSSWMELYPTISSDIRSLICLVSLDQLHLIFSSFMLRILKHVIMTRRRLIKDILKGXX

SEQ ID NO: 569 - protein, 402 aa, Homo sapiens
  misc_feature (375): Xaa equals any of the naturally occurring L-amino acids
  misc_feature (379): Xaa equals any of the naturally occurring L-amino acids
  misc_feature (395): Xaa equals any of the naturally occurring L-amino acids
EAQQYLMDNPTFAEDEELQNMDKEDALICFEEHIRALEKEEEEEKQKSLLRERRRQRKNRESFQIFLDELHEHGQLHSMSSWMELYPTISSDIRFTNMLGQPGSTALDLFKFYVEDLKARYHDEKKIIKDILKDKGFVVEVNTTFEDFVAIISSTKRSTTLDAGNIKLAFNSLLEKAEAREREREKEEARKMKRKESAFKSMLKQAAPPIELDAVWEDIRERFVKEPAFEDITLESERKRIFKDFMHVLEHECQHHHSKNKKHSKKSKKHHRKRSRSRSGSDSDDDDSHSKKKRQRSESRSASEHSSSAESERSYKKSKKHKKKSKKRRHKSDSPESDAEREKDKKEKDRESEKDRTRQRSESKHKSPKKKTGKXSGNXDTSGSELSEGELEKRXRTFWSTG

SEQ ID NO: 570 - protein, 120 aa, Homo sapiens
  misc_feature (1): Xaa equals any of the naturally occurring L-amino acids
  misc_feature (116): Xaa equals any of the naturally occurring L-amino acids
XPMAETSLPELGGEDKATPCPSILELEELLRAGIFLQPCGRIWPNLFIGDAATANNRFELWKLGITHVLNAAHKGLYCQGGPDFYGSSVSYLGVPAHDLPDFDISAYFSSAADFIXRALN

SEQ ID NO: 571 - protein, 93 aa, Homo sapiens
  misc_feature (43): Xaa equals any of the naturally occurring L-amino acids
VYFLPVARYIRAALSVPQGRVLVHCAMGVSRSATLVLAFLMIXENMTLVEAIQTVQAHRNICPNSGFSGSSRFWTTDWGGRRGGSDLAGSQDP

SEQ ID NO: 572 - protein, 47 aa, Homo sapiens
SENEHLPGPWWAEKIDSEEKPLLSSRSRGQMSCDGFPGWGGWGGRHL

SEQ ID NO: 573 - protein, 166 aa, Homo sapiens
TPEEMSFSKLCLGQSLSLPLLHPDGHRWVHASTAPSCPKRKALYLQWQPFPTSALGGSSQCHLGPPFPAAARPVRSVGPGRGQASSGPSQAVPTALASAHQGHFHCQGPEGAAVAAGLLWTEGSQAPRGARLAPLGTGASPFLFSRRGKRCPLCGLLTPLCVRPFI

SEQ ID NO: 574 - protein, 365 aa, Homo sapiens
  misc_feature (3): Xaa equals any of the naturally occurring L-amino acids
PGXAEFGRVAMALRLLKLAATSASARVVAAGAQRVRGIHSSVQCKLRYGMWHFLLGDKASKRLTERSRVITVDGNICTGKGKLAKEIAEKLGFKHFPEAGIHYPDSTTGDGKPLATDYNGNCSLEKFYDDPRSNDGNSYRLQSWLYSSRLLQYSDALEHLLTTGQGVVLERSIFSDFVFLEAMYNQGFIRKQCVDHYNEVKSVTICDYLPPHLVIYIDVPVPEVQRRIQKKGDPHEMKITSAYLQDIENAYKKTFLPEMSEKCEVLQYSAREAQDSKKVVEDIEYLKFDKGPWLKQDNRTLYHLRLLVQDKFEVLNYTSIPIFLPEVTIGAHQTDRVLHQFRELPGRKYSPGYNTEVGDKWIWLK

SEQ ID NO: 575 - protein, 126 aa, Homo sapiens
  misc_feature (78): Xaa equals any of the naturally occurring L-amino acids
  misc_feature (115): Xaa equals any of the naturally occurring L-amino acids
ALEPALPAQAKEELAAAMVRVLRATGRAQALVTDLGTAELARCGGREALLFRENTLATKAIDEYMKLVAQDYLQETLXQVVRRLCASTEDCEVDPSKCPASELPEHQARLRNSCXEVFETIIHSYE

SEQ ID NO: 576 - protein, 244 aa, Homo sapiens; identical to SEQ ID NO: 462

SEQ ID NO: 577 - protein, 58 aa, Homo sapiens
VSENISLPTLGDFEDDAIKKAHIEKDFIAFCSSASGNRFLVHRISLWVLSIEKLTTTH

SEQ ID NO: 578 - protein, 199 aa, Homo sapiens
HERGPCHTYKVQRLNESTSYKFCIQACNEAGEGPLSQEYIFTTPKSVPAALKAPKIEKVNDHICEITWECLQPMKGDPVIYSLQVMLGKDSEFKQIYKGPDSSFRYSSLQLNCEYRFRVCAIRQCQDSLGHQDLVGPYSTTVLFISQRTEPPASTNRDTVESTRTRRALSDEQCAAVILVLFAFFSILIAFIIQYFVIK

SEQ ID NO: 579 - DNA, 12477 bp, Homo sapiens
agtgatggaggagagaagatggcggaagcggagtgagtgactagatggtgactgatgtcgtaactagggggggcgagttggggcagcgacacgttcccccaggggaaagctcagggctcttttgcgggcagtgtggggaaagagagactcgagacccgtcctatcgtggaggagccggctaggcccgtgtcgcggggcgaagacgaactctagggtccagttaccctccaggcaggagcgccccttccgccatcaggtcccggatctgcgcggccctgcgcgcagggtcacccttgggactccgggagctggggttttccggggaacgagcccgggtgggctcctcaggcgctgtcattcctgcaagtgggccccgcgggcagccttgttacggctgcctgcgcaggggcccgcggaggctgggtagggcagggcgggcactgccaggcctccttcgccttcttctccttcccgccccggcgccaccccactcctcctcagcgggagaatccgacacgcggggctgcccgcttccctcgtgccggaggcatcccggcgtgggcctgagagcggcgggggctgcttgcaggtctggtgaggctgaaaacaccctgaaagaaaggtctttccctcgattctctgggtgcagcgttgctgcctcacacgcgggccacattcttgtgtgtcggtgtgacggtatgtttagttaacgactccagaacttactgtttcctgggtaggcctcttgtgcaccagaactgctggctgtattttgcaggtattagtatgcctagacggtggagttaccaaagttgttcttttgtgccaggcctcgaaatgcagtgcgatggtttggccagttccgctcaaccgatgtttagacttatgccgagaatttggattctctgtgaccatttttggttaggagttagaactgtttaccatactgtttggattggagggcatagttgagcagattaacacttttaaaaaaccagaacttaagctggccttttgcatgtcactggtacacgatacggtagtagtatgacaggcagcagttcggtaaaaagtttaccttacctaccactaatactgtataatgttgaacagttaccatatgatgctgtgatttgattggaaggcagtttggaaaaaaaaaaaaaaaacagaagcataaaaatgtatgaattatttactaatccaaaaagtaagtgaggagtcagctttcttcctgacggttttcctttcacttttcctcttattttctttttctttctttgtgacagcgtctctcactcttatctcccaggctggagtgcagtggcacgatcatagctcactgcagcctggccctcttgggctcaagcgatttccccaccttagcctctcaagttgctgggaccacagtcctgtgccaccaggcctggctaattttttatttttcatttgtagagacagggtttccctatgttgcccaggctggctttgaacgcctaagctcaagcagtcctccccctgagtggtaggatgacaggtgtgaaccgccactcaaggcccccacttttcctttttttttttttttgttcggtttttttttacatttggttcctcagagaatataaatactgtttacatacgtaatatagaacaaagaaaatttgtacttaaaaaagcaacgctatggtaatagtgtatgtgtaccaattagtgccagattcatttgttttttcatggaatagaaagtgttcttacatttttatcagtgctgctaatgtggggtgggtgggatttagtttctcagaagaaaagaccgataagaaaagggagataaaaccagtataatctcttgtgtgcttttcaccttcgaggtacatttctggcccgacaaaaactactgctcttctggtttctaacaatatggaggtccttagaattgacttaaagtgtttgaatttattcaaatacagattctgtatttagtggaattttgtaccacaacaagtaagattatagtattggagggaagaaagtctggtataaaagtgtactttactgtccatacatgaggaagtgacataatttatgttttcaaaatctggagtaattctttgtgaaaaagattttgtaagggtatgggaagttgctgtttgctgcttctctgtgttctcacagcaatctgctaataagtataactcagctattagaagtagtaaggacagcgttgtagactgattaggggaaaagccagtgtgagttaaaaaaattactttttaacattttttaaaaagaacttatttttaagcaaagtttatatggtaaactaaactaagctagttaacatgagtccctaggcattctgttctaatgtataggtaagaatgactttagtttgtaattagtgtggtcaaaagaatgtaaagaaatgttttaaaatactctgatactgcttaaatttttattttcctaggtagtttagtattctctcattacctgttttggtttaaaaaaaatctttcggtaatgcaaagataaacttttggctatgcgttatctgagttacgtattctgaatcatttgaattcaaatgtagtaggtattaactattaaatatgctccatatatgtgaagtatttttcccttctaagtgcttatagtgactgtgtgttggctgtcttttatgagagccttcctagcagtttagattactgctgattatttctttggaatgaatattctttaaagctcataagataatgcttttaccaatacaaacactttgtgtgacctgccagatttaaggaccatagtacagctatggatactgaaccaaacccgggaacatcttctgtgtcaacaacaaccagcagtaccaccaccaccaccatcaccacttcctcctctcgaatgcagcagccacagatctctgtctacagtggttcagaccgacatgctgtacaggtatttcagctgtagtgatgggtagtctaagacttaagatgtcatattactttttgcttaagctggatttatgtattgtttcatattctcaaatgtacagttagaattactaatgtttcaatcaactgtctcaatccattttgtgtggctatagcagaataccaagactgtgtaattgtaaagaaaagaaacttatttcttacatttctggaagctgggaagtctaatatgaaggagctggcatctcacgagggccgtcttattgcctcattccgtggtggaagactagagagcaagataccaaatttgcagcctcaagcccttttaaaatttcctttagtcggccgggcgcggtggctcacgcctgtaatcccagcactttgggaggccgaggcgggcggatcacgaggtcaggagatcgagaccacggtgaaaccccgtctctactaaaaatacaaaaaattagccgggcgcagtggcgggcgcctgtagtcccagctactcgggaggctgaggcaggagaatggcgtgaacccggaaggcggagcttgcagtgagcggagatcgcgccacagcactcccgcctgagcgacagaacgagactccgtctcaaaaaaaaaaaaaaaaaaaaattttcctttagtctattcatgtgggcggagtccttatggcctaatcacccttcaggggtcctacctcttaacactgttgcattggagattaagtttccaacacatacttaattgggggacacatttaaccacagcaacagccaacaaagttaattaataatcatactattggctaggcgtggtggctcacgcctgtaatcccaacactgtgggagaccaaggcagggagatagcttgagcttaggagttggagactggctgggacaacatgttgaaaccccatctctacaaaaaatacaaaaatcagcagggcatggtggcatgtgccagtggtcccagctactcaggaggctgaggtgggaggattgcttgagcccaggaggtcaaggctgcaatgagctgtgatcgcaccactgtactccagtctaggtgacagagtgagaccctgtctcaaaaaaaaaaaaaaaaaaaaaatgctgggcgtggtggctcacacttctaatcccagcgctttgggagaccaaggctggcggatcacttgaggtcaggtgtttgagaccagcctgatcaacatggtgaaaccccgtctctactaagaatacaaaaattagccaggcatggtaatgcatacctgtaatcccagctacttgggaggctgaggcaggagtatcacttgaaccctggcggcagaggttgcagtgagccaagatagcgccactgcactccagcctgggcaaaaagagtgagactccatctcaaaatatatatatatagtattgagagggcttacatttgtcagcatgtagtttataggattatgtgtaaagaaaattataaggggaaagtctctaggtgctgctacagtatgaaggcattcaacctagagccccaacatacagaatggttgtagctttattttatattggaactcaaaatatagacttagggagatctgttcaggtatgtagatatgttacgaagtttatattaaacccaggtggcctaagaaccctaagcaggaggatccattctaaataccttaggggcagagggggaagggaatattgaactaggaagtcacttagttgagaaagtaaagtttacttagttaacatttatgataatggaggttggggcaatatggtattatataaaaagggcatggaccttccactctattatactttgtttgaattccattttcattatctttaggagctatatagccttgggtatgagacataatccccttgagcctcagaaaactaaaatgagggtgagactacttctttcattaattactctgaggattaaatgaagtatctttgagattaatgaagtatctagaactgtgtaaggcacattataggtttccagtagatagtaatagctaatacttattgaataattgctacgtgccaaacatttgataaatgttacatgaattatctccattaatcattaccagccctctgtgaagtagctattattattatctccattttactgatgggaaaataaatgttttaaatcagctaaataactttcccaaactcacctagctagttctcagacttcagcccttgtgcccttaaccactctgtgaattcttattttttctattatacctgctttcttctggtagaatccttataattgcatccaccctgaaaacaactgcttgcaatatagtccttcctctgctccatttttccatggtggataccccagtataatgtctatttaactgtttttggtttaggatttagttttccaaaatcactgtggagtggaaccagccagttcaccagaaattcaaacttgaatgcagagtgaggttttaatgttttttacctttctctgaggtaagggatacagggaaaaggatttagatcttttttttttttttttttttgagaccgagtctcgctctatcgcccaggctggagtgcggtggcgtgatctaggctcactgcaacctctgcctcccaggttcaagcgattctcctgcttcagcctcctgagtagctgggactacaggcacgtgccaccacacccagctaattttttgtatttttagtagagatggggcttcaccatgttagccaggatggtctcaatctcttgagctggtaatccgcccgcctcggcctcccaaagtgctgggattataggcgtgagccactgcgcctggcccccccctttttttttttttcttctctccctctgtgttgcctaggctggagtccagtggcatgatcacaactcacgaccccctgggctcaagtgctcctcctgcttcagcctcctgagtagttgagactacaggcacatgtgactatgcttggctaatttttttattttgtagagacaggatctcactatgtcgcccaggctagtcttgaccttctggctttaagctctcctcctgccttagcctcccaaagtgctgggatgagccaccacgcctgactgataatgtgatcgcttaatataccattttgtcctctagttttcaattaagctgcatagattaataaaaaattaatagaaagatatgtagatgtagatatatctcataaatagcactgactctgtttcttatgagaccatagaattgcttctcccaaaatgaaatcaaatcaatatttattgaactacctaagtaattctttaatcttccagcttgctttttctgtcctgggaattctcttcaccctccttgggtgaataagaatttataataaataagaacaatttgctgtatctataacttgtatttactcattgctgtgagtaattgaatagtagtgaaagactgtgctgacaacagaaaaaatgagtatactctgacaaaagtatgtgtcaaatagattgttatttcagtttgattttagaatttttttccgtatacagtccagtgcttttagaattttgttatggaattagaagaacaaatagagattgatctgactaaaaaaggtatattgttataattctgaatcacttaatgctggcctatagtcccctgcaggtagaggtcaaaagctcccattgattttgtgacagaaatttgtatcaggcatagtagtctatagttggagaggtgagatattaacacatgaaaataaacaataacacacagaaatatgctgtcttgaagtttagataaaaggattcatggcattatggctcaagatgtcctgagagaccctcaagctataggattatggcactattactcccttagctctttgaaaactctggtttgatgctgcgattagggttctgtgctgtttcagagtcacagtgagcacaatgtgactttcggatttggttgtataggattgacttattctgacttaaccttttggagaaatgtaagaattttctctgattttagtagagtacttgacttttctatatttatttatgaagtttcaggctcagattttacattttactaacaaatattcacagtaattaacactttttaaggaattaagtaagaatagttttattcaatgttgaagcaaaacaaggtatttgacatttaaaaattttttaaattattgagtaattttctaaagaagaaatagctttataattttattttttatttttattttattattattatttttttgagatggggtcttgctctgtcgtctaggctggagtgcagtggcatgatctctggtcactgcagcctccacctcctgggttcaagcagttctcccacctgagcctcctgagtatctgggattacaggtgcatgccaccatgcctggccaagttttgtatttttagtagagacagggtttcactatgttggccaggctagtcttgaactcctgacctcaggtgacctgcctgccttggcctcccaaagtggtgggatcacaggcatgagccaacctgcccagctgctttgtaattttatatgattattaataatacctgctcattgtaagattttcagacatctatagaagagtatgaagtagaagctaaaaatcacctctaatctagctacccatcagtggtctttgaaagttttcctgtggattctttcaaatattttaatataaaaatggtatcttactctatatactattttgtaacccactgattttctttttgttagtaaatatagatcggtatcagcaatgtacactatagtggccagtagttacttgtggctgtttacattaaaattaaaattaattaaaattcaatttaaaattaactcaattctttagttgcactaaccacattttaagtgctcagtaggcacatgtgactagttgttactgtataggacagcactgatctacattactatttgttatggttgcatggtaaaggtattctctccacacccaagccctgaattctacgaagttttatccaaaaaggttatgccaacttgaatttttactagcaatatgggagtattggtttccccaggtagtagtagtattcttttaaatctttatccatctgaaagttggaaaacagtatcttgttctaatttgtaagtttttgactactggtgagattgaaaatcttttgaaatgcttagttggcctggcctgtcttttgcgaattgtccactgggttttgttttgttttttttttctttgagatgggagtcttgctgtgtcgcccaggctggagtgcagtggcatgatcttggctcaactgcagccttcacctcacaggttcaagcgattctcctgcctcagcctcccgagtagctggggctacaggcatgtgccaccatgcctggctaattttttgtgtttttagtagagacggggtttcaccatgttagccaggatggtcttgatctcctgaccttgtgatccgcccacctcggcctcccaaagtgctggaattaacaggcgtgagccaccgtgcccggcccactgggtagttttaatgtgtacaagttagtgatttctagtgatatgtaactaggaaagaaataatgttaataagcttgatgatattatgtattaaagcagtgaaattttaaactgccacttttttatactttgattttctgattaagataaaggttgagattatggtttgacattggttcaattgacttatcacaggtaattcaacaggcattgcatcggccccccagctcagctgctcagtaccttcagcaaatgtatgcagcccaacaacagcacttgatgctgcatactgcagctcttcagcagcagcatttaagcagctcccagcttcagagccttgctgctgttcaggtaagactaaaataagagtttatgagatcaaagtttctgttatctgtaggtagttactgaaaataaatagattgggtattatttcagagttctcagatgtcctgtggttatttttcccggaggaaatatattaataggttgccgaatagaagttaattgagaaaaaggggatatgtttttttatgttactctgtttctagcttttgtctcagtgctttttatccagattgaagaaatgctatgctagtttatgtgtataaagttctaggtacaacagtgagtacttaggcttacataaattgtatttttactaaaaataagattaaaaaaattatataagtaattatactcattaaaaaatcaaacaatattaagttgtttataagagataaagtaaagctgttccttttccctgtctatcactgtttcccgttcttcaaaggtggccacagtaacaatctaatacatatttctccagaaattttttatacaaagataggtatatccatttttctaaaatccaatcatattattcctactgataacaggatttcattattaaatgcttgtttttaaaaaagatttttgttactattgtactatttaaataaagctgtgtaagatttaatcttaaatcccctcaccagaggaggatctcaattgactgaacctgaaaaaggtttatttctgttaccaacagattctcagctgttgcttcttagtagtgtaatttttaaataacatgtttgtgatacaagttaggaaactgaaacccactcactggctcttgctgtagctctaatttctttttcataactctggagtagtgattccactttaaagatgacagagacccataaagtgaaactgacaataaagtagctaataaaataagattagtctttggatcccctgttttcaccattcagcttttccttatttaaaaaatctgtttaaccgaagcttaagccatgttgactataaaattagttgtttcatacataggccttttgacatttattgttgtggttttgtgttatcatggtaccagaaagttcttaacttcaggtttttaccgacatattctaaaagtcttactattttaggcaagtttgtccagtggaagaccatctacatctcccacaggaagtgtcacacagcagtcaagtatgtcccaaacgtctgtaagttccctaaatttttttttcctggatttaaaattttaaagaattgttttccaaaagtaaactgttgttatttatgaagctgttattataatttgttgcatgctgtttaaagtaacaattgcccagaaatagaaatgataaaattcaagaattcagaactaatgttaaacttatgaaaatctgagtcttaaaaaaatctttttgtattatttcttgtatatccatttgcactgatcatgttcagatcttatgtggtttcagctttctgtgtgtattgaaagcctaaaatatacaatgcagggatattggccatgaatttactgtgatatacaatagtatgtcatgtccttggtagacatctaagcatttctaactttgtgcaattcacattttagaaattatactttcagcttacatgagttatttgggttcaatttgcaagtatccattcaagatagggtaatttattttgagaaaggagtaaaagaaagctgattcgctatattgcacatatatattgggaaattgtgccaagtttcccaggtaaaataaatttatgggcatggtaatacttgtttagcttttaattttggtataattttaaactgcaataataataaaaaaatttctgtatctactctactcagattaatcaattattgcatattgccccattactttatcattcattcttttccactacatgtatacatatttttttctgagtcatttgtaagttgagatatgttcctttattcctaaatactttgatgtgtatttcctaagaacaaggctattgttttttgaagccacagaaaaattactaaattcaggaaatataacattgatacagtgcagttcattttcacatttcatcatttgtctcaggtttcccaacctcatcactatggacattatgagccagataattctttgttgtcaggggctatcgtgtaatttataggatgtttagcagcatccctggctactagatgccggcagcttgtggtctttctccttcctctagtgtgacaactataggtgtttcctggtggggggcaaactgcctgtagttgagaacctaataatgtcctttctagatattttttcctggtccagaatggtaatactttgatacttcataaaattggctccaatacaatatagtttgtaggttgttaaggaattgaaggttaaggaattgtgctctatttcttcagctaagggtatggtctttgctaactacatgctgtggtcagcatatagctgtggttttttttgttgtttggtttttttttctggctgttgatctgactttttttttttggcgtgggaatgtcctggagtgtgaacaagattagtttaaaaagttccctatgacttgaagatgttagattaaatgaaaaacttaaataatgtaacctagctcttaagcattaatactggagtttttgtcattgacatcagatgtctttaatacaatggtaattaaggaaaggagtggtaaatattttgtgggctactgaaggaaattatatagacaaattctttattctgtgaaatactggaataacaataggatgtatttgtatagatatgttattttgaatttttttccttcatgttattaaaaggtatctttttaaactgtctttcattatggctttatgtatgtgacattcacagaagttagaattctagtgattgtgcttatatatatgacattgttaatgttacttgtcataaaccagcagcattataccatgaagtatgccaaaagctgtaaatggctggtgggggaagataagtaagtaggaagaacagattcccagtaaaataaaggaataatacattacatttgctttatttactatccgttgtgagcttctgctcaagtaatttgactagcagtaaaaattacaatgcccaaggtaacttagtaaatttaggtcaatatccaaaaacgggggggagcatggtaacagatctcttaagtagtgatgataatgagccatcaggtaacagactagtagttttcagagttttgattattttgagttaggtttccagataacagtgaagccgtgggaaagggtccattctccagaagaaaaaacagctgtcaggtaaccagctaggtagttggggcttagagtaggagtgggatcccaatggggaaatggaatattattttaaaaatcaagtccaaagtccagtcataccacctgggggaactgtgtacctactgattgattattcctaatatgaaaacccgaaatgctctaaaatctgaaatttttgcacaccaacatgacattcaaaggaggagtgttcattggaacattttggattttggatttttagatttggcatgctaaaccagtttgtatctttccaaaatctgaaaaaaaaaaa

SEQ ID NO: 580 - DNA, 169 bp, Homo sapiens
ttttttttttttttgagacggagtctcgctctgtctcccaggctggagtgcagtggcgtgatctcggctcaccgcaagctccgcctcccgagttcacgccattctcctgcatcagcctcctgagtagctgggactacaggcgcccgccaccgcaccctgctaatttttt

SEQ ID NO: 581 - DNA, 4423 bp, Homo sapiens
ggaaccaaattctgccaccagcacaacaattgcagtttactggagcatgaacaaggaagatgtcattgattcatttcaggtttactgcatggaggagccacaagatgatcaagaagtaaatggtaggattgctaacacaaatacaaatgcatatgcatattcatgcatcttcatgtgaagtatttaaatatacacctgtattatgactcttcccacaaagcagtttatagccatttacaaaacaacaacaaaaccccaacaaccatataatgaaataataactacagaagcaaaatttgggaatcaagatcagggaaaacaaaatggcataaatattataatagtcaacacaaatattgtaattgagattcacatttggctttgagctctcagaataacaggagcaatgaagtggttctcatttagagaaaggaggtaacataccagagtttcaaggaaaataaagtttttaacagtacgaaagcctgaaagacaagtgtcacgtgttccacttttagggaagaagccatagagaggacagtgtgctccacaatgacctgaatgcaaatgaagcatgggatgtcatgggtggcagtttctcaggtctgtctttgctaaaagccaccaacaagccacaagattcattcagtgttcacagttcccagggcgtgggcctaggtatggtgtagtcttcctgtgtcccaaattaatgtgtggatagaaatgaaagtgcttagtagggtgaatggatggtatgtcttacagctgagcctctgtaagtatctctcagctcagaaggacttctaataagccctggaagccaggcagtttgaggttgtgcttcctgatgaatcagagctgggagtgctgccattctgtgttgcttgttgaagacagacccacatactatggaaaacagatgagcatgtggcaggcttggcgtcctaactcaggtgcccaatttgtaatcaggaatgaatggtaatatattatactattactaatatttaagtcttttgaaatgtcatgtgataattaatttagaaaaaagtttaaaaaagcaattataggcatggtgtaaagttggctaaatctgtctgtaatgtcatgactcctgttttattgacctatttccatatgcctgtcacagcacaaccaagtaagtgttactatccctatttgcaagtgagaaaactaatgtgaggttacatagtttgctcaaggccttgcaacttgtacatgaccgggggcaggagtcaaacacacatctttcaggctccaaagtttattcttttgtttgtttgtctctgtgtgtgttttgttacaccatacttcatctccatctatttctagctctatttcatggctctctgagacccttcttatcaaaagaaaattgttgcttggcctgcttttttttttttttactgggtttcacccccaccccaaacacttccctatcctgtgtctcattgtttctgtgccctgaactgtgttaataacagttagctaatctgataatctagtctgtgataccatgtcatgtttagtagggtctctagtcacatatgttatgtacactgttaaagggagtgccagggtaataggatgtattagttcattctcacactgctataaagacatacctgagactgggtaatttatgaagaagaggtttaactggctcacagttccacaaggtgtacaggaagcatggcagaggaggccttaggagacagaatcatggcagaaggtgaaggggaagcaagcacatcttcccatggctggcagggaagagagagagagtaaagcaggaagtgctacacactttcaaacaaccagatctcttgagaactcatttatgagaacagcaagggagaagtccacccccatgattcaatcacctcctaccaggctcttcctccaacactgggaattacaattcaacatgagatctgggtggggacacagaaccaaaccatatcataggaccttgcctaaaagaatgattccagtgaaaattgcagacacagattctgggatatgggagaaatattcttcagtgtacaggtccttatgaggttctttaaactgaactttctgtccagaaagtacagctcattggaaaggagagaggcaattgagaagcctgctaagttgaagagctcccgattttcttttaaagaaacagtctgggttcttaagtggaaaagttttgaagatgtgacattcaagagtcataagggggggaaactgaaattaccataggcaaaatttacaaagaaaatcatatgttttaaaggagataaaatttcagtgagaataatcaaattggcccaaattggtaggtttgttcagaatggtattggataatgtttactattaaaatattcaaagtaagatattttttaaaatttttgaaggcaaatgtcttaattggacaaagttacttcttagagtagcttatgacctatcaaagttatttaagtatttctataaattgtggaaatccctagtggaaagaattctggaattcatgagaagaaaccaggatttgaaacctggaaggtcatactgaataccaaaatagtttactaatctgtaaagatgtttaaaaaccatgaagttgtcctttttttatgacatactcttctgaaatattggcactggttcttaagattttcttgagaatgtgttactgagatttaagctaacatatacattatgtaattttaatattcgctactgaaataagttactttaattgtggtatatgaagctcagaatcttactaatatgctattattttctgagaagtgttaacaagtattactatgtcatcctaagtatctcttttcagaatgctgttgctttcatatgtattctaaggagctggttttcacataatggtatctgtaaggttatcagtttgcattttccactgaaagaaaatcatagatgactttctccagtaactataacttttaattaactttggaagatgtcttcgattttaattgtgtcttatgctagagttggtagaagaatacagactgacagtgaaagaaagctactgcatttttgaagatctggaacctgaccgatgctatcaagtgtgggtgatggctgtgaacttcactggatgtagcctgcccagtgaaagggccatctttaggacaggtaaggagatggatgctaagggtgcattagaagacaacgctcagttcttcacagactcttgagatcagccagtaagtgtttattaagcacctattgtgtgttgagtgttgtgcaaagtgctggttatacaacgatgacttaagcctggggtcctgttctcaagaagctcatgctcaggtggggagatggaaaaacagaggatcatagaaaatgtgtggtaagggccatatccagatatacacaggttattatgagaacactccagaggggcacccaagttggcctggggcaggggcaggatcggaactgcttcctagaactgatgcctgcagaaaatgctttaaaggatcaataggaagtaatgcgttaaaggaggatattccacttgaaaaagacatgagcagaggcatcaaggcaagaaacagtatggagtgtgcaggacactgtaagaagtttggtattatttcttagacttaaacaaaggaaagacaagataagaaaggctaacatagagaggccgtgtttgcaaggtaagaagcttgggctgcgtgtgggtgctgggaacccccaaaaggttttaagcagtggtatttaactggaaatgcattctcacgatgaaatcttttcacagggtaagaagcctaaaccaaggctgcactgcctttaagataatggtaacctgcctcaggggaagaaatagtttactcctaccctttatcctttcctcttgccttttaaaacaagcctttattgagcacctactgaggacaagatcatggctaacttgtgtgtactgggacaggggaaagaatctttattttgatttgcttgtatatgtataaagaaagtctagtgggatttttaggaagctactattaggggctgtttggggatgggtgagaactgggcaatgtggaaggcagagaagggagagagacatcaccatctatatttgatcccttttgggtttttaacacagaatacactttctgatgaaaaattgaaaacagaatcatgccgaagccgtggaagatcatgtgcttctcaggtcccaggaaagcaagctggcattgctccacgactgtcctgactctctttctgcagcaccctccacccctgtgatccgcgctgaggactgtactgtgtgttggaacacagccactatccgatggcggcccaccaccccagaggccacggagacctacactctggagtactgcagacagcactctcctgagggaga

SEQ ID NO: 582 - DNA, 10503 bp, Homo sapiens
actgcttctttagagaaaatgcctgctgcgttttcccttttcgaacattatgatgacagctcggcaagaagtgaccagatgttaaaacaagtggctggtaagcattttaatatattaattacctagatgaaatatggcagtttttgcttgtttgttttgtatgtaatgatatatacaaaagattttgagtgtaaagacatgtaactggaaaaagaaaagtattagttgtaaaatgttacagctagactctgaaattgagcatgggaggaacatcccatttctgtgcatttccatctgaagctttatgacttgcttggagattgaggaggtggaaggagccatggaaccaaagggtctcctctttttttttttctttaatttaaaaataggatttctctccctctcttctcatttgcctcataccagcagccaggtatagaagaaaaaagaagtcaaatgttttcctacgtgtcaaacagatttctctttatgagtggttttcccctcttcaattcagttcttttccccttttttcaaactaaacagatgagcttagagaactatcagctcagcaccatggtctgtagccaggagcctcccactcggctgtcagaagcatcctgccagctcttcacaatattttttaatgtgctattttaacaaacaggacaatgaaacttatttagatttttcaaagctgccatgtttcagtgaagttaccaagtttttcttactgtacaacatgctcaggtgtcctccttaaaagatgctgtagtcttccaaaatcacctcaaagattacagctattcaggaggctgaggcgggaggatcacttgagcctaagggttcgaatccagcctgggcaacatagtaagacccccatgtctaaaaacaacaacaacaacaacaaaaaaccccaaaaaacaaaaacaaaaaagatggctgttgtgtttaaattgatgattaacattcattcctgtacaaagagttttaatttagtaactactaaaaaggctactgtatgtctaaaaagacaaaaacaacacgacaccacacaacacacaaaaacccaaaaccccaccagccctttataaaattaaaaactcaatcattgatcttaatggattttctctagaaatgtctcaaagtgttttcttgtaatgtctttaagagggattagactaggacagtgattgcaaactaagaaagtttgattaacagagctggtcttttgcttttaagggattcattatatgccactgttcatttaggaggatatgcttttcaatacttaatgggcaatgagaggacgtttaatatattttagaggtcacagagttaaaatgtcacaaagtgttaacaattaactcagcaagtgcacatggcggtccctgtggctggaagccttttatggagagactgatctcagagccataaatgttactttgtgcgtctgtttcacaaaattggagcccagggtgttgacttgctgctaagtagtttttgtgcatttggtgacacctctcagaagtcctcacctgtgacctgaaaagttgatctgatgaccccctacctaaactaagcagatacaatgagaaaaggatgtgagttttccaatgagaagtagcagcccatacgatttattccatgcttatacgatggctggcattgtggaaaccgttaagcatatcaaatcatctaatctcaccataacccaaggaggtaggttttgttattcccatttgacaggtgaggaaaggtgaggaaagagaggaacagaaaaatgttctattttcaagaaaacacagccggttggggtgtgtttggcaggggagtttggcttcagagtctgccccacagcgaaaaggcagagtgctgctgagaaagatgagagaaacagatcatgataaacaaacatgaatctaggcttccttgatgctggcacctggggattttttttttaattgtggtaaaatacacataacaaaatttaccatcttgcccatttttaattgtacagtttagtggcattaaggacattcacattgtggtacaaccatcactgccatcctctccagaactcttcatcttgcaaaacagaagctctatatccattaaacactaactctccatattctccccttctcctggctgtggcagccaccattttactttctgtttctgtgaatttgattactctaagtacttcatctaagtggaatcatatggtatttctctttttgtgactggtttgtttaacttagagtaatatcctcaaagcttaccatgttgtaacgtgaaacttttcctcctcttatctattcatccattggtggatacttgggttgcttccactttttggctattgtgaataatgctgctcccctgaggacgttccaaaggccaggttgagtggaaatctgtatctggtcacagattccaaagtccagtttggttaatgcttaactcccccagtgtggtggctctttttgggcacatttcatcaggcagaggggtgattcttctacccaattccttagcctcttataatgaagccctaaactttcattttggtattttttggtatcatacctttttttttttccccacacagagtctcactctgtcgcccaggctgaagtgcagtggcaccatctcggctcactgcaacctccgcctcccgggttcaagccattcttatgcctcagcctccccagtagctgggattacaggcgtgcatcaccatgcccagctaattgttgtatttttagtagacatggggttttgctgtgttggccaggttggtctcctactcctgaactcaagtgatctgccctccttggcctcccaaagtgctgggattacaggcatgagccactgcgcccggccagcatcatacttattcaagtttattactgtaaaagtgtaaacagagttgctaaactccgggtctctgatgttgttctaccacataagaattgtaaatccagccattattattagattatatctatggaatattcttattcccttttcattttagaattctttgaaaagtaaaagtatttcctgtttctgaaaaaaggtgttttacctttaatgcttttgggggaaggagcacattaaaacaaaatttctaacctacatactttgcttcttccttgaaattaagtgattttcttggatcaattaatcagtttttaagtttgttaatttacccgagaaagagagagaaatgtgaaagatgttttcatttttaaaaagcagatacagctccatgtataattcataggataaaagggggagcattttcactgttcatgcctcaagtaattctcaaatactgcttcaaagatgatcgacaatccttgaaacattctgcttggtcctttcatagacctgggtaacatgaaaatttactgaactacatttttctggacagacttatttagaatgtgacatccatttcctgctgggaagacaagcaataaattccaagacagtatcagggtctctgacccgtgatcagttcctggggaggtgctctcaccagcggcctctgccttagcatgcagttcgctcctcaggtcttacctctgtggcctctgtggctttccagatgatgggtccctccttcagccctcatcttcaggagcttcctgccttgcccctctgtttcctgtgctcctgccaaggcccctttgctttctgaatgttagcactggttatctgtcagccactttgctaagcactcgatagatattatttgcttcctataatgacactgggaggtaatactattattattgttttctcattttaaagatggggaaactgaggctgagataacagaggggatggatctggtgtttaaccttgggccagccactctgcattgaagtccatgaacttgacccttctcctcttctgcttctcgtttttcacaactgtgtattttttcagctctttatcgctgttgcatcttctcagtttgtctctttttgctacattctttagacccatttgtgtttttctcatttgtaccttcttgctgaactgatctttatttttcttttcctttggtgtccacttttaataaagtaatctcataaaatttggcccatattattaatatttcagtaaacttatctctcaggaaattgttgactggaaaaaaaacccataaaaaataaatgtaaaaacatgctattgggtcaggtgcagtggctcatgcctgtaatcccagcactttgggaggccgaggcgagcggatcacctgaggtcaaggagtttgagaccagcctggccaacacggtgaaaccccatctctactaaaaatacaaaaaaatgagctgggcgtggtagtgggcgcctgtaatcccagctactagggaggctcaggcagcagaattgattgaacccaggaggtggaggttgcagtgagctgagattgcaccactgcactccagcctgggtgacagagcaagactccatctcaaaaaaaaaaaaaaaaagcatgctattttttcaactatgggaataaccttttcctctaatttgtaaaatatgttcaaagattttatgtcataagttttgggggagaattgcatagaagtttgatttatggcattgcatataccattaatgtttgtacgcataatcatgaactttacaagtttctaggaaaacatccaaggattttgttgtcattaaaattcagaacaacggagttatactaggtgtctaaaatgtatgctgaatcagtaggctactttttctgtagtttttatatattttgtttaatttttaaaaagttagtaattaaaaaaattgatagggctagccatgttggaaagaaaaaatgggatagtcgtttcagaaagtgtattttgatattttatttttgcaagtatttttctggcttgaagatacaccaactatatcttaaaagggtttcatttgcctctatcgtgaatatagaatctatattgatacagaatgatacaaccttggctatctagcaaagcatgtgttttgttttgaaggataagcaagtcagttgttgcctcctctaacctacatgagtttattgctccaactataggactgtagaagagtattctcaagtgatcccattttggaatacatttttgtttatttctgtgtgtattatatatgtgcacatgtacaaatgcatagaaaatattgtggagggatacacattcaacagtgattgcatctaaagaatacagctgggcgcggtggctcacgcctgtaatcccagcactttgggaggctgaggcgggtggaatccttgaggccaggagttcaagaacagcctgaccaatatggtgaacccccacctctactaaaaatacaaaaattagccaggtgtggtggtgcaggcctgtaatcccagctactcaggaggctgaggcaggagaattgcttgaacccgggaggcggaggttgcagtcagccaagattgcgccactgcactccagcctgggtgataaagcaagactccatctcaacagattaaaaaaaaaaattggccggtgtggtggctcatgcctgtgatcccaacactttgggaggccgaggtgggtggatcacctgaggtcagaagttcgagaccatcctggccaaggtgatgaaaccctatctctactaaaaatacaaaaattagccaggtgtggtggcaggcgcctataatcccagcaacttgggaggctgaggcagaagaatcgcttgaatctgggaggcaaaggttgcagtgagccgagatcgtgccactgcactccagcctgggtgacagagtgagactcagtctcaaaaataaataaataaaattaaattaaagttaaaattaaaataaaataaaaaataaaaaaatataattggggttgggggtttgggggaacaagagagcccttctacttttatactatgtatttctgtattctttgaatatttttcaacaagcataagtaacttgtgcccaaaaaattaataaaaacagcattagttacaataaaacttgtttatattccagttccacagcctcctagattagaacctcaggaaccaaattctgccaccagcacaacaattgcagtttactggagcatgaacaaggaagatgtcattgattcatttcaggtttactgcatggaggagccacaagatgatcaagaagtaaatggtaggattgctaacacaaatacaaatgcatatgcatattcatgcatcttcatgtgaagtatttaaatatacacctgtattatgactcttcccacaaagcatttatagccatttacaaaacaacaacaaaaccccaacaaccatataatgaaataataactacagaagcaaaatttgggaatcaagatcagggaaaacaaaatggcataaatattataatagtcaacacaaatattgtaattgagattcacatttggctttgagctctcagaataacaggagcaatgaagtggttctcatttagagaaaggaggtaacataccagagtttcaaggaaaataaagtttttaacagtacgaaagcctgaaagacaagtgtcacgtgttccacttttagggaagaagccatagagaggacagtgtgctccacaatgacctgaatgcaaatgaagcatgggatgtcatgggtggcagtttctcaggtctgtctttgctaaaagccaccaacaagccacaagattcattcagtgttcacagttcccagggcgtgggcctaggtatggtgtagtcttcctgtgtcccaaattaatgtgtggatagaaatgaaagtgcttagtagggtgaatggatggtatgtcttacagctgagcctctgtaagtatctctcagctcagaaggacttctaataagccctggaagccaggcagtttgaggttgtgcttcctgatgaatcagagctgggagtgctgccattctgtgttgcttgttgaagacagacccacatactatggaaaacagatgagcatgtggcaggcttggcgtcctaactcaggtgcccaatttgtaatcaggaatgaatggtaatatattatactattactaatatttaagtcttttgaaatgtcatgtgataattaatttagaaaaaagtttaaaaaagcaattataggcatggtgtaaagttggctaaatctgtctgtaatgtcatgactcctgttttattgacctatttccatatgcctgtcacagcacaaccaagtaagtgttactatccctatttgcaagtgagaaaactaatgtgaggttacatagtttgctcaaggccttgcaacttgtacatgaccgggggcaggagtcaaacacacatctttcaggctccaaagtttattcttttgtttgtttgtctctgtgtgtgttttgttacaccatacttcatctccatctatttctagctctatttcatggctctctgagacccttcttatcaaatagttgttgcttggcctgctttttttttttttttactgggtttcacccccaccccaaacacttccctatcctgtgtctcattgtttctgtgccctgaactgtgttaataacagttagctaatctgataatctagtctgtgataccatgtcatgtttagtagggtctctagtcacatatgttatgtacactgttaaagggagtgccagggtaataggatgtattagttcattctcacactgctataaagacatacctgagactgggtaatttatgaagaagaggtttaactggctcacagttccacaaggtgtacaggaagcatggcagaggaggccttaggagacagaatcatggcagaaggtgaaggggaagcaagcacatcttcccatggctggcagggaagagagagagagtaaagcaggaagtgctacacactttcaaacaaccagatctcttgagaactcatttatgagaacagcaagggagaagtccacccccatgattcaatcacctcccaccaggctcttcctccaacactgggaattacaattcaacatgagatctgggtggggacacagaaccaaaccatatcataggaccttgcctaaaagaatgattccagtgaaaattgcagacacagattctgggatatgggagaaatattcttcagtgtacaggtccttatgaggttctttaaactgaactttctgtccagaaagtacagctcattggaaaggagagaggcaattgagaagcctgctaagttgaagagctcccgattttcttttaaagaaacagtctgggttcttaagtggaaaagttttgaagatgtgacattcaagagtcataagggggggaaactgaaattaccataggcaaaatttacaaagaaaatcatatgttttaaaggagataaaatttcagtgagaataatcaaattggcccaaattggtaggtttgttcagaatggtattggataatgtttactattaaaatattcaaagtaagatattttttaaaatttttgaaggcaaatgtcttaattggacaaagttacttcttagagtagcttatgacctatcaaagttatttaagtatttctataaattgtggaaatccctagtggaaagaattctggaattcatgagaagaaaccaggatttgaaacctggaaggtcatactgaataccaaaatagtttactaatctgtaaagatgtttaaaaaccatgaagttgtcctttttttatgacatactcttctgaaatattggcactggttcttaagattttcttgagaatgtgttactgagatttaagctaacatatacattatgtaattttaatattcgctactgaaataagttactttaattgtggtatatgaagctcagaatcttactaatatgctattattttctgagaagtgttaacaagtattactatgtcatcctaagtatctcttttcagaatgctgttgctttcacatgtattctaaggagctggttttcacataatggtatctgtaaggttatcagtttgcattttccactgaaagaaaatcatagatgactttctccagtaactataacttttaattaactttggaagatgtcttcgattttaattgtgtcttatgctagagttggtagaagaatacagactgacagtgaaagaaagctactgcatttttgaagatctggaacctgaccgatgctatcaagtgtgggtgatggctgtgaacttcactggatgtagcctgcccagtgaaagggccatctttaggacaggtaaggagatggatgctaagggtgcattagaagacaacgctcagttcttcacagactcttgagatcagccagtaagtgtttattaagcacctattgtgtgttgagtgttgtgcaaagtgctggttatacaacgatgacttaagcctggggtcctgttctcaagaagctcatgctcaggtggggagatggaaaaacagaggatcatagaaaatgtgtggtaagggccatatccagatatacacaggttattatgagaacactccagaggggcacccaagttggcctggggcaggggcaggatcggaactgcttcctagaactgatgcctgcagaaaatgctttaaaggatcaataggaagtaatgcgttaaaggaggatattccacttgaaaaagacatgagcagaggcatcaaggcaagaaacagtatggagtgtgcaggacactgtaagaagtttggtattatttcttagacttaaacaaaggaaagacaagataagaaaggctaacatagagaggccgtgtttgcaaggtaagaagcttgggctgcgtgtgggtgctgggaacccccaaaaggttttaagcagtggtatttaactggaaatgcattctcacgatgaaatcttttcacagggtaagaagcctaaaccaaggctgcactgcctttaagataatggtaacctgcctcaggggaagaaatagtttactcctaccctttatcctttcctcttgccttttaaaacaagcctttattgagcacctactgaggacaagatcatggctaacttgtgtgtactgggacaggggaaagaatctttattttgatttgcttgtatatgtataaagaaagtctagtgggatttataggaagctactattaggggctgtttggggatgggtgagaactgggcaatgtggaaggcagagaagggagagagacatcaccatctatatttgatcccttttgggtttttaacacagaatacactttctgatgaaaaattgaaaacagaatcatgccgaagccgtggaagatcacgtgcttctcaggtcccaggaaagcaagctggcattgctccacgactgtcctgactctctttctgcagcaccctccacccctgtgatccgcgctgaggactgtactgtgtgttggaacacagccactatccgatggcggcccaccaccccagaggccacggagacctacactctggagtactgcagacagcactctcctgagggaga

SEQ ID NO: 583 - DNA, 144 bp, Homo sapiens
aaaaaaattggccggtgtggtggctcatgcctgtgatcccaacactttgggaggccgaggtgggtggatcacctgaggtcagaagttcgagaccatcctggccaaggtgatgaaaccctatctctactaaaaatacaaaaatta

SEQ ID NO: 584 - DNA, 2396 bp, Homo sapiens
cctaactcaggaaactaatagtgagcttgtgtataatgtaaatcggaatgtctccatgatagattggtaacattaaggagctaattacatgtatattatcatggagacatacctgcctctccaaaagcatgaaatatgtaaagagattcttctaggaaaaaagaaatgtgacgctctctcaccaagatgctgaagctgacattcatcaataagcagctgtgcatccactaggcatttggtaaatgttaacttatctaccgaggtggtgttttcttagcctcccacctccttgctgtggagcagcttcatgtaccatgatgcatattcagatcattcttaatactcatattttgatagagaggtttttaggttttcttttaaaccaagtttattgagataaactactttggtaggatatggaacttaggaataatggtatgaaactagacagcttttttttttttattacactttaagttctgggatatgtgttcagaacatgcaggtttgttacataggtatacacgtgccatggtggtttgctgcacccatcaacctgtcatctgtattcggtgtttctcctaattctatccctcccctacccccctgcccccaaaaaggccccagtgtgtgatggtcccctccctgtgtccatgtgttctcattgttcaactcccacttatgagtgagaacatgaggtgtttggttttttcttcctgtgttagtttgctgagaatgatggcttccagcttcatccatgtccctgcaaaggacatgaactcagtccttttttatggctgcatagtatttcgtggtatataagtgccacattttctttatccagtctatcatttgggttggttccaaatctttgctattgtgaatagtgccgcaataaacatacgtgtgcatgtgtctttatagtagaatgacttataatcctttgggtatataccccataataggattgctgggtcaaatggtatttctggttctagatccttgaggaatcgccacactgtcttccacaatggttgaactaatttacactcccaccaacagtgtaaaagcattcctatttctccacatcctctccagcatctgttgtttcctgactttttaatgactgccattctaactggtgtgagatggtatctcattgtggttttgatttgcatttctctaatgaccagtgatgatgagctttttttcatatgtttgttggcagcataaatgtcttcttttgagaagtatctgttcatatcctttgcccactttttgatggggtttttttttcttgtaaatttgtttaagttccttgtagattctggatataagccctttgtcagatggatagattgcaaaaattttctcccattctgtaggttgcctgttcactctgatgatagtttcttttgctgtgcagatgctctttagtttaattagatcccactggtggattttggcttttgttgccattgcttttggtgttttagtcatgaagtctttgcccatgcctatgtcctgaatggtattgcctaggttttcttctagcgtttttatggttttaggtcttacgtttaagtctttaatccatcttgagttaatttttgtataaggtgtaaggaaggggtccagtttcaattgtctgcttatggctagccagtttttccaacaccatttattcaatagggaatcctttccccgttgcttgttcttgtcaggtttgtcaaagttcagctggttgtagatgtgtggcattatttctgaggcctctgttctgttttattggtctatatatctgttttggtaccagtaccatgctgttttggttactgtagccttgtagtatagtttgaagtcaggtagcatgatgcctccagctttgttctttttgcttaggattgtcttggctatgcaggctcttttttggttccatatgaaatttgaagtagttttttccaattctgtgaagaaagtcagtggtagcttggtggggatagcattgaatctgtaaattcctttgggctgtatggccattttcacaatattggttctttctatccatgagcatggaatgtttttccatttgtttgtgttctttcttatttctttgagcagtggtttgtagttctccttgaagaggtccttcatatcccttgtaagttgtattcctaggtatttaattctctttgtagcaattgggaatgggcattcactcatgatttggctctgtgtttgtctattatggttgtacaggaatgcttgtgatttttgcacattgattttgtatcctgagaatttgctgaagttgcttatcagcttaaggagattttaggctgagatgatggggttttctaaatatacaatcatgtcatctgcaaacacagacaatt

SEQ ID NO: 585 - DNA, 1684 bp, Homo sapiens
cctaactcaggaaactaatagtgagcttgtgtataatgtaaattggaatgtctccatgatagattggtaacattaaggagctaattacatgtatattatcatggagacatacctgcctctccaaaagcatgaaatatgtaaagagattcttctaggaaaaaagaaatgtgacgcactctcaccaagatgctgaagctgacattcatcaataagcagctgtgcatccactaggcatttggtaaatgttaacttatctaccgaggtggtgttttcttagcctcccacctccttgctgtggagcagcttcatgtaccatgatgcatattcagatcattcttaatactcatattttgatagagaggtttttaggttttcttttaaaccaagtttattgagataaactactttggtaggatatggaacttaggaataatggtatgaaactagacagcttttttttttttattacactttaagttctgggatatgtgttcagaacatgcaggtttgttacataggtatacacgtgccatggtggtttgctgcacccatcaacctgtcatctgtattcggtgtttctcctaattctatccctcccctacccccctgcccccaaaaaggccccagtgtgtgatggtcccctccctgtgtccatgtgttctcattgttcaactcccacttatgagtgagaacatgaggtgtttggttttttcttcctgtgttagtttgctgagaatgatggcttccagcttcatccatgtccctgcaaaggacatgaactcagtccttttttatggctgcatagtatttcgtggtatataagtgccacattttctttatccagtctatcatttgggttggttccaaatctttgctattgtgaatagtgccgcaataaacatacgtgtgcatgtgtctttatagtagaatgacttataatcctttgggtatataccccataataggattgctgggtcaaatggtatttctggttctagatccttgaggaatcgccacactgtcttccacaatggttgaactaatttacactcccaccaacagtgtaaaagcattcctatttctccacatcctctccagcatctgttgtttcctgactttttaatgactgccattctaactggtgtgagatggtatctcattgtggttttgatttgcatttctctaatgaccagtgatgatgagctttttttcatatgtttgttggcagcataaatgtcttcttttgagaagtatctgttcatatcctttgcccactttttgatggggtttttttttcttgtaaatttgtttaagttccttgtagattctggatataagccctttgtcagatggatagattgcaaaaattttctcccattctgtaggttgcctgttcactctgatgatagtttcttttgctgtgcagatgctctttagtttaattagatcccactggtggattttggcttttgttgccattgcttttggtgttttagtcatgaagtatttgcccatgcctatgtcctgaatggtattgcctaggttttcttctagcgtttttatggttttaggtcttacgtttaagtctttaatccatcttgagttaatttttgtataaggtataaggaaggggtccagtttcaattgtctgcttatggctagccagtttttccaacaccattta

SEQ ID NO: 586 - DNA, 2314 bp, Homo sapiens
ctgcaggctttcaccagttctcaggatgcccatagggatgggtgaagcctgcctggcctgtggtgctttccagtggccgtcatctcattagggccccacagtggcattaggatgcacctctcggcggtgttcaacgccctcctggtgtcggtgctggcagcggtcctgtggaagcatgtgcggctgcgtgagcatgcagccacactggaggaggagctggccctcagccgacaggccacagagccagccccagcactgaggatcgactacccgaaggcactgcagatcctgatggagggcggcacacacatggtgtgcacgggccgcacgcacacagaccgcatctgccgcttcaagtggctctgctactccaacgaggctgaggagttcatcttcttccatggcaacacctctgtcatgctgcccaacctgggctcccggcgcttccagccagccctgctcgacctatccaccgtggaggaccacaacactcagtacttcaacttcgtggagctgcctgctgctgccctgcgcttcatgcccaagccggtgttcgtgccagacgtggccctcatcgccaaccgcttcaaccccgacaacctcatgcacgtctttcatgacgacctgctgccactcttctacaccctgcggcagtttcccggcctggcccacgaggcacggctcttcttcatggagggctggggcgagggtgcacacttcgacctctacaagctgctcagccccaagcagcctctcctgcgggcacagctgaagaccctgggccggctgctgtgcttctcccatgcttttgtgggcctctccaagatcactacctggtaccagtatggctttgtgcagccccagggcccgaaggccaacatcctcgtctcaggcaatgagatccggcagtttgcacggttcatgacagaaaagctgaacgtgagccacacaggagtccccctaggcgaggagtacattctggtctttagccgaacccagaacagactcattctgaatgaggcagagctgctgctggcactggcccaggagttccagatgaagacagtgacagtgtccctggaggaccacacctttgctgatgtcgtgcggctggtcagcaatgcctccatgctggtcagcatgcatggggcccagctggtcaccaccctcttcctgccccgtggggcaactgtggtagagctcttcccatatgctgtcaatcccgaccactacactccctataagacgctggccatgctgcctggcatggacctccagtatgtagcctggcggaacatgatgccagagaacacagtcacacaccctgagcggccctgggatcaggggggcatcacccatctggaccgggctgagcaagcccgtatcctgcaaagccgtgaggtcccacggcatctctgttgccggaaccccgagtggctcttccgaatctaccaggacaccaaggtggacatcccatccctcattcaaaccatacggcgcgtggtgaagggccggccaggaccacggaagcagaagtggacagtcggcctatatccaggcaaggtgcgggaggcacggtgccaggcgtcagtgcatggcgcctccgaggcccgcctcactgtctcctggcagatcccatggaaccttaaatacctgaaggtgagggaggtgaagtacgaggtgtggctgcaggagcagggggagaacacctacgtgccttacatcctggctctgcagaaccacaccttcactgagaacatcaagcccttcaccacctacctggtgtgggtccgctgcatcttcaacaagatcctcctgggaccctttgcagatgtgctggtgtgcaacacgtagcgagcaggccacagcctggcctcgggaaggtggctcctgcagttcagcgtccctgggcccattaatcccactgtggagacttctgggaactatttattgagcaggcctgtgcctccacatcatcttgttgtctctggggtgtggtgtcacagcactcctctttgccctagagataagggacctgacttccccttctcccatcctgaacatttgtacccctggagaagttccttagcagggaggaggaagaggagaggaggaagcaaagaatcacaaggaacctctggctaggtgatcctgatgtttcctactgagtttttctggtatccagatttctggaaaccgagtaatcatgtactgtttgattgggtggttcatctgcttccatcccagtgaaatttacctgtagcccagtgaagggtgtgtttggaacattcattaaatgattctaagcatcttg

SEQ ID NO: 587 - DNA, 2311 bp, Homo sapiens
  misc_feature (168): n equals a,t,g, or c
ctgcaggctttcaccagttctcaggatgcccatagggatgggtgaagcctgcctggcctgtcgtgcttccagtggccgtcatctcattaggccccacagtggcattaggatgccctctcggcggtgttcaacgccctcctggtgtcggtgctggcagcggtcctgtgnaagcatgtgcggctgcgtgagcatgcagccacactggaggaggagctggccctcagccgacaggccacagagccagccccagcactgaggatcgactacccgaaggcactgcagatcctgatggagggcggcacacacatggtgtgcacgggccgcacgcacacagaccgcatctgccgcttcaagtggctctgctactccaacgaggctgaggagttcatcttcttccatggcaacacctctgtcatgctgcccaacctgggctcccggcgcttccagccagccctgctcgacctatccaccgtggaggaccacaacactcagtacttcaacttcgtggagctgcctgctgctgccctgcgcttcatgcccaagccggtgttcgtgccagacgtggccctcatcgccaaccgcttcaaccccgacaacctcatgcacgtctttcatgacgacctgctgccactcttctacaccctgcggcagtttcccggcctggcccacgaggcacggctcttcttcatggagggctggggcgagggtgcacacttcgacctctacaagctgctcagccccaagcagcctctcctgcgggcacagctgaagaccctgggccggctgctgtgcttctcccatgcttttgtgggcctctccaagatcactacctggtaccagtatggctttgtgcagccccagggcccgaaggccaacatcctcgtctcaggcaatgagatccggcagtttgcacggttcatgacagaaaagctgaacgtgagccacacaggagtccccctaggcgaggagtacattctggtctttagccgaacccagaacagactcattctgaatgaggcagagctgctgctggcactggcccaggagttccagatgaagacagtgacagtgtccctggaggaccacacctttgctgatgtcgtgcggctggtcagcaatgcctccatgctggtcagcatgcatggggcccagctggtcaccaccctcttcctgccccgtggggcaactgtggtagagctcttcccatatgctgtcaatcccgaccactacactccctataagacgctggccatgctgcctggcatggacctccagtatgtagcctggcggaacatgatgccagagaacacagtcacacaccctgagcggccctgggatcaggggggcatcacccatctggaccgggctgagcaagcccgtatcctgcaaagccgtgaggtcccacggcatctctgttgccggaaccccgagtggctcttccgaatctaccaggacaccaaggtggacatcccgtccctcattcaaaccatacggcgcgtggtgaagggccggccaggaccacggaagcagaagtggacagtcggcctatatccaggcaaggtgcgggaggcacggtgccaggcgtcagtgcatggcgcctccgaggcccgcctcactgtctcctggcagatcccatggaaccttaaatacctgaaggtgagggaggtgaagtacgaggtgtggctgcaggagcagggggagaacacctacgtgccttacatcctggctctgcagaaccacaccttcactgagaacatcaagcccttcaccacctacctggtgtgggtccgctgcatcttcaacaagatcctcctgggaccctttgcagatgtgctggtgtgcaacacgtagcgagcaggccacagcctggcctcgggaaggtggctcctgcagttcagcgtccctgggcccattaatcccactgtggagacttctgggaactatttattgagcaggcctgtgcctccacatcatcttgttgtctctggggtgtggtgtcacagcactcctctttgccctagagataagggacctgacttccccttctcccatcctgaacatttgtacccctggagaagttccttagcagggaggaggaagaggagaggaggaagcaaagaatcacaaggaacctctggctaggtgatcctgatgtttcctactgagtttttctggtatccagatttctggaaaccgagtaatcatgtactgtttgattgggtggttcatctgcttccatcccagtgaaatttacctgtagcccagtgaagggtgtgtttggaacattcattaaatgattctaagcatcttg

SEQ ID NO: 588 - DNA, 2314 bp, Homo sapiens; identical to SEQ ID NO: 586

SEQ ID NO: 589 - DNA, 430 bp, Homo sapiens
ttttgttttgtttctgttgttgttaatgaacttagaatacagtgtactagaaaaaaaaagctagaatgtatgatacttggtcacggtaattttcatttcctgaagtttggaggtggggagtatatgatatattcatatgtgtgggcccaacctttggataagagtaggccagaagagatctcatgcctccaggaatgaccttcaactaagtaatgcccaacaggagttgatagacatgtatcccagcttccatactatatccagcatatgatcatgggaggaaggctacacatggcattaactgctcattaatgtaccctgtatgtgttggctttggtcccttctctgttctcactttcccattcccctacacgtgtttcatgggataatttctcaaactgttttgattcaaatccttgcccctgactct

SEQ ID NO: 590 - DNA, 430 bp, Homo sapiens; identical to SEQ ID NO: 589

SEQ ID NO: 591 - DNA, 430 bp, Homo sapiens; identical to SEQ ID NO: 589

SEQ ID NO: 592 - DNA, 2046 bp, Homo sapiens
cctgcttgaagcctaactgtccaccagaaaggactgctctttgggtgagttgaacttcttccattatagaaagaattgaaggctgagaaactcaggtaagcacttttgttgtgggtatacttttaccttcttggtctcctcatctcccaggtggtaacaaacagaaatgactaaagcctatatgtgtgtgtagtggaaaggagcagagggaactgaatacagagaggatcctgaatacacgatgctgaatagagagaggggactcctgggggtctttggggatggggaaggaattaaaaaagttggagggcactgggtttactgagagcagcgggatggatatagaagaggactgaggtttggagcagaataagactaagatatttaggcaagagatatttagataaaaacttggggaaatatttgagaatgggaaaggactaagagaacctaaggagagagttagggatcttgagatgaagaggcctgggaatggttcaggaggatactgaattaaggtgaggtccaggaacagtttagatgtccagggtcccagaactgttcaagagatctaagttgaatgctaggttctgattccctcttcctcttccaccctctgcctctttagcctctatcatgtggaacagctctgacgccaacttctcctgctaccatgagtctgtgctgggctatcgttatgttgcagttagctggggggtggtggtggctgtgacaggcaccgtgggcaatgtgctcaccctactggccttggccatccagcccaagctccgtacccgattcaacctgctcatagccaacctcacactggctgatctcctctactgcacgctccttcagcccttctctgtggacacctacctccacctgcactggcgcaccggtgccaccttctgcagggtatttgggctcctcctttttgcctccaattctgtctccatcctgaccctctgcctcatcgcactgggacgctacctcctcattgcccaccctaagctttttccccaagttttcagtgccaaggggatagtgctggcactggtgagcacctgggttgtgggcgtggccagctttgctcccctctggcctatttatatcctggtacctgtagtctgcacctgcagctttgaccgcatccgaggccggccttacaccaccatcctcatgggcatctactttgtgcttgggctcagcagtgttggcatcttctattgcctcatccaccgccaggtcaaacgagcagcacaggcactggaccaatacaagttgcgacaggcaagcatccactccaaccatgtggccaggactgatgaggccatgcctggtcgtttccaggagctggacagcaggttagcatcaggaggacccagtgaggggatttcatctgagccagtcagtgctgccaccacccagaccctggaaggggactcatcagaagtgggagaccagatcaacagcaagagagctaagcagatggcagagaaaagccctccagaagcatctgccaaagcccagccaattaaaggagccagaagagctccggattcttcatcggaatttgggaaggtgactcgaatgtgttttgctgtgttcctctgctttgccctgagctacatccccttcttgctgctcaacattctggatgccagagtccaggctccccgggtggtccacatgcttgctgccaacctcacctggctcaatggttgcatcaaccctgtgctctatgcagccatgaaccgccaattccgccaagcatatggctccattttaaaaagagggccccggagtttccataggctccattagaactgtgaccctagtcaccagaattcaggactgtctcctccaggaccaaagtggccaggtaataggagaataggtgaaataacacatgtgggcattttcacaacaatctctccccagcctcgccagagatcaagtctctccatcacttgatcaatgtttcagccctagactgcccaaggagtattattaattattaataaatgaattctgtgcttttaa

SEQ ID NO: 593 - DNA, 2270 bp, Homo sapiens
tgccaatcttgtaaatagtggttttttgtttcgtttttgccctcttgatctaaaattgcttttgttttcagatggtggccagcagagatctgcaaccccaggtctgtgccactgaacatccagggccttaaacatgacttgggggacttccctgtattcttctttggttctcatgactactactgggtacaccagggcagagtgttcccttatgttgaaggagacaaaagctttgctgaagggcagactagtattaacaagaccttcaaaaagggtaagctggatgatgtttacagtgactcaaaactacaactccggtgtcagtttctcaacatctcctcacctccctaatatttctggtattagagaattttcactagacattatgatcctgtgtccataagcttccagtcacattagaaccaggtttaaaatacatttcaatattgtagactgtgctgtgtatttgaaaggaatttcttcagtgtctttctataaacacagattattctaggaatagtcttttttttttttttagacagggtctcactcttgcccaggctagaatgcagtggcatgatcacagctcactgcagccttgaactccagggctcaagtgatcctcttgcctcagcctcccgagtagctggggctacaggtgcccactatcatgcccagctaatttttgtactttttatagagatagggtttcaccatgttgcccaggctggtcttgaactcctgggttcaagcgatctgcccacctcagccttccaaagtgttgggattatagctctgagccaccaagcccagcctgagaatagtctttttaatcaagtgaagttcctttgcaacagaagagtagtaaagacttgccatgaaaagccttacaactgcttttgcaatgagttgccagcaagtttggctttctggtaagggtaaaatgaatttaaatctattacaaggcaaaaagctgctcttagggtcacttggagacttctgatcattgaagtagagcctcttccctgtggctacagcatgcacagagcatagtgttcagtgagttatatcctatttctttgttaccccatcctggtggtaaacagtaacttccagaaaataattctaaaaagaaaaatctcaggccagatgcaaagcattgggaaggcagcgtaaaactactatcccatcaattttcctttggtttttggtatttacatactttgtatcatcttattggcagcactggaagaagctgcaaaacgtttccaggaattgaaagcacaaagagaaagtaaagaagccctagagattgaaaaaaactcaagaaaaccccctccctacaaacacatcaaagtaagtctttatctctggcctgggattgccaaataaaataagaaacaaagtaagtctttactatgaaagcattgttatttaatagatgagacgaaatgcattactctttagtagttaaagaccctctttgacttgtgcaaacttttgctaattatcacagtcttctgtaaaacagagcttctgttggaagcatcaaatgggagccatagttattgtgctgtgaaaattaggtctttgataagtcctctcatacctagtagcaacatgtcttatgtgaaatcctgttcttgttctaccaggttatcccgccaccaaatgagaatataggtgtttactccctttatttcagagaacccacaaacaagcgtattttctcttgttttcagttatgaaatttccatctagtgaaagtagaaatacccaggataaataagtgaaaattcacatgaggctttgatatttttgtcaactaaatgacaaaagagatggttattaatctcagcttattcatcaggaaagacaacctttctcggagtagcaccacgaggcagtagcgtggatgttttagatgttcctgttcacattgccagatgacttacctgctgcctctctctcgcttgcgattttgttttctaggctaacaaagtaataggaaaggtgcagatccaggttgctgacctgtcagagattccccgctgtaactgcaagccagctgatgaaaacccttgtggcttggaatcggagtgcctgaacagaatgttgcagtatgaatgccacccgcaggtgtgcccagctggagatcgttgtcagaaccagtgctttacaaagagactataccctgatgcagagatcatcaaaacggagcggagaggctggggcctcaggaccaaaaggagcattaagaaggtagcatg

SEQ ID NO: 594 - DNA, 2270 bp, Homo sapiens; identical to SEQ ID NO: 593

SEQ ID NO: 595 - DNA, 232 bp, Homo sapiens
gaggtcaggagattgagaccatcctggctaacatggtgaaaccccgtctctactaaaaatacaaaaaattagccgggcgtggtagcgggcacctgtagtcccagctactcgggaggctgaggcaggagaatcacttgaaccctggaggtggaggttgcagtgagttgagatcgtgccaccgcactctagcctgggtgacagagcgagactccatctcaaaaaaaaaaaaaaa

SEQ ID NO: 596 - DNA, 130 bp, Homo sapiens
caggagattgagaccatcctggctaacatggtgaaaccccgtctctactaaaaatacaaaaaattagccgggcgtggtagcgggcacctgtagtcccagctactcgggaggctgaggcaggagaatcact

SEQ ID NO: 597 - DNA, 8269 bp, Homo sapiens
cagaccccaatatttggagcagaaccccaagatttgacatctaaaacctcaagcctggagctgaactctgaattctgggcctgggaccttgaaatctgggactggatttccagtactgtaccctggaacccactcttggggacctgaaccctgggattcaggcctcaaattccaagatctggactgtgggattccaaggggcctgaacccgagtttgggcctgaagtccttgctgcagacctgagtgcttaaatctggggcttgagacctcccaatcttgactcagcaccccaatatctgaatgcagaaccccgggatcggatctcagactctaaaccccaccgtttggctgcttagcatcccaagactggacctgggagaccctgaccctgaacaacccaaactggacccgtaaaactggaccctagaggcccaatatttaggggtctggaaccccgagtattaaggtctggagactccgttgccacagatttgagccgagtcaggacacagtccctctacagaagccttggggacaggaaaagcatgaccagatgctccctccagagccctgacctctgactcccctggagctaggactctgctccctggggctgcttctagctcaggtaaggctgctgaaacctcaaggtggggacgggctgggaggagcattgtggctgcgggttacggtaccaggtaccctttgacactcttggggtttctccagaaaaaaagacattcccccatgggtctgccttcagctcctgctctgctccaaacactctctggacactggccatccttgcccctctctgaccttccctgcctcagttgatgggacctccaggtctctgacccctgcaacccttacagcctttcgctgtctatccggtccgaccgtctccgccacctctcttgtccaccactcctctctctgggctcctttctccacctgtcctctcaatggccatctctgttccctttttctctctctgatcatctttgtgacacccctgtccacaggtcctctctccagtcgcctctgcctgctgcttctcagtgaccatcgctgacatctgtgtccactgtgcctctctctaatcatcattcaccagctctcttgctccttctccacccctgaatctaagcctaggtctgtgaccgtccccatccatctttgacattgctgtccaccactcttctctccagcagcctctgtccatctctcctctctagcttcctctggccacctttccctttctctggccatctctcccactgctcttgccctcctcccacccctgaccctaactcccagtctgcaactgtctgaccatctctggccacctctcctctctctctcactcactgatgccctctgatcatctctggccacctcttctctctctctcactcattgatgccctcttgatcatctctggccacctcttctctctttctcactcactgatgccctcttgatcatctctgcccacctcttttctctcgctcgctgatgccctctgatcatctctggccacctcttctctctctctcactcactgatgccctctgataatctctggccacctctcctctctcacttgctgatgccctctgatcatctcgaacatctctgctgcctttcctctctccgatgacctctccccgcaccatcctcctgagcagctgtcctgggctcccactgactctgccatgtctgtccttttcctcctctctgaccaccttgctggctttgggccgtttctgaccacgtgtctctgacatggtcatctcccccagatctgagcccaacccatgccctcccttctctttgtccactgctcatcttcctgaccatctgtaaccccttctcttctctggtcatatctgaccacttctgatcattgttgccaccctggctgccccgtctccccatggccagcttttaccatctctgaccacgtctaaagccctctggttttcctgccactcacccagaccagctgtcatttctctgaccatttctttacttttttcttttggagagacagagtcacgctctgttgcccaggctggagtgtggtggcgcaatcatagctcactgcagcctcaaattcttgggctcaaattgatcctcccacctcagtgtcccatgtagctaggaccacaggtgggcgccaccatgcctagctaatttttaaaaatttttgtataatagatacacggtctcactttgttgcccaggctggtcttgaactcctggcctcaagccatcctcctgcctcagcctccccaaatgctgggattacatgtgtgagccaccgcgcctggccttcctctggcttttggtcacatctgacggtctttgaccagcccttctgccctcagcccactgtgaccttctctcctggtctcagaccacccccagcccctgcagaacccctcttctgccctcacgcctcccctcttctccgcaggacacccctgcccgcgatggccatcctcccgttgctcctgtgcctgctgccgctggcccctgcctcatccccaccccagtcagccacacccagcccatgtccccgccgctgccgctgccagacacagtcgctgcccctaagcgtgctgtgcccaggggcaggcctcctgttcgtgccaccctcgctggaccgccgggcagccgagctgcggctggcagacaacttcatcgcctccgtgcgccgccgcgacctggccaacatgacaggcctgctgcatctgagcctgtcgcggaacaccatccgccacgtggctgccggcgccttcgccgacctgcgggccctgcgtgccctgcacctggatggcaaccggctgacctcactgggcgagggccagctgcgcggcctggtcaacttgcgccacctcatcctcagcaacaaccagctggcagcgctggcggccggcgccctggatgattgtgccgagacactggaggacctcgacctctcctacaacaacctcgagcagctgccctgggaggccctgggccgcctgggcaacgtcaacacgttgggcctcgaccacaacctgctggcttctgtgcccgccggcgctttttcccgcctgcacaagctggcccggctggacatgacctccaaccgcctgaccacaatcccacccgacccactcttctcccgcctgcccctgctcgccaggccccggggctcgcccgcctctgccctggtgctggcctttggcgggaaccccctgcactgcaactgcgagctggtgtggctgcgtcgcctggcgcgggaggacgacctcgaggcctgcgcgtccccacctgctctgggcggccgctacttctgggcggtgggcgaggaggagtttgtctgcgagccgcccgtggtgactcaccgctcaccacctctggctgtgcccgcaggtcggccggctgccctgcgctgccgggcagtgggggacccagagccccgtgtgcgttgggtgtcaccccagggccggctgctaggcaactcaagccgtgcccgcgccttccccaatgggacgctggagctgctggtcaccgagccgggtgatggtggcatcttcacctgcattgcggccaatgcagctggcgaggccacagctgctgtggagctgactgtgggtcccccaccacctcctcagctagccaacagcaccagctgtgaccccccgcgggacggggatcctgatgctctcaccccaccctccgctgcctctgcttctgccaaggtggccgacactgggccccctaccgaccgtggcgtccaggtgactgagcacggggccacagctgctcttgtccagtggccggatcagcggcctatcccgggcatccgcatgtaccagatccagtacaacagctcggctgatgacatcctcgtctacaggtgcagggtccaggcactggggtagcttgggtgggggagtgaggcaaggggagggttgagggtacacctactaataccctacaccgaagcacaactgataagtgatgctggaaggttccaaaagaaatcagagagcaaaagtaaaagaaatcaggcagcaaggataacaagactctggcagaaagggtcaatgaaatctgacagcagtgataaaaagaagtcagacaagaaggacgaagtaaatgagacagcaaatgttaaaatatatcaggctacagggctaaaaaagatcaagcaataaggataaacgaaatcaggctgcatgagtaaaaagaaattaggcagcaagaataaatagtagtagcaaacataaaaaggaaaccaggcagcgggaggagaaagtaatcagggcagaagaataaaatgttaatgggcaagggtgggtggggaagataaggggataaaaataaatttaagttgtaaagataaagagagaaacaccaggttttccagatgacaggactagatactagctgggctgcaggaagaaaaggagatcaaacaggaaagcacagggagcccagaaacaatgaaataagcagctctgttagaaaaagaaatcagaccagaggttagaaggaaattgcagggaggaggttcgatagagactgggcttcggtgtgtgtggtgtgaactattccatgtttcaagttctaatatagtgacatccagatttttttttttttgagacagggtctcactttgtcgcccaggctggagtgcagtggtgcaatctcggctcactacaacctccacttcccgggttgaagcgattcttgtgcctcagcctctcgagtagctgggattacagacgtgcaccagcacgcccagctaatgtttgcattttatttttagtggagacggggttttgccatgttggccaggctggtctagaagtcctgacctcaggtgatccacctgcctcagcctcccaaagtgctgggattacaggcgtgaaccaccacacccagtgtagattttttcttttctttttttttttgagacggagtctcactctgttgcccaggctggagtgcagtggcacaatcttgactcactgcaagctccgcctcccaggttcatgccattctcctgcctcagcctcccgagtagctgggactacaggcgcccgtcaccatgcccggctaattttttgtatttctagtagagatggggtttcaccatgttagccaggatggtctcgatctcctgacatcgtgatccacccgcctcggcctcccaaagtgctaggattacaggcctgagccaccgcgcccgacagattttttattttctaaatcaaatcaaacctagttcaagttccttttgccaggtaaacagaaatatccagtttgccacacttgtgggggattctcttctctctcctgttgttgcaaacacagaacctggggtttacacactccaagaggtggctcagtccaacttgttcccccaagctggagagcactcagcacatctgcagtgaccgcatgtggtcagcagtggtggctgctgacctaggtgctgttgacacctcttaccaaagtccaaccttgcatggatggactgcggctgtgggtgagtccctgtcctcacggccaggctgggccaagggtgcagccccaaggctgactgtaaagactggacctccccagggttgaggactgttccttggggacctagtagtacctggatgtcctttccctcccttggggccaacacctcaagaaaaggccacttgatttccatttcagtcctggcaacccactgagctcattctactccctttctcagacatgactcggaagattgcacggaagtcctgcccctgaaaatcacacaagtcggccaggcgcggtggcttaacccctataatcccagcactttgggaggccgaggcaggtggatcaccaggtcaggagtttgagaccatcctggctaacacggtgaaacctcgtctctactaaaaatacaaaaaattagctgagtgtggtggcacgcgcctgtagtcccagctactcaggaggctgaggcaggagaattgcttgaacctgggaggcggaggttgcagtgagccgaggctgtgccactgcactccagcctgggtgacagagtgagactccgtctcaaaaaaaaaaaaaaaaagtcacacaagtcctggccaccttgccaggtggggaatgggatgaatgctgtcctagacagtcaccctgccccaggcggccacggagttccctgtacctctctcattagaatagcctaggaataaaacaggtgataagtcaactctccaacagggtgcccaactacaaaagaaactatagtgaaattgggtggtaaggattaaaaggaaacaagaaagaaaaagataaatagaaaccagccaacagagataaaagagaagcaggtgacagagccggaaagaaataaggcaacagggagaaaaagaaagcagtagtgacggaggcacattagtttaatgaaaagggaatcagacgacaggactcattggaaaacaggctatcaatacagtcatcataataaggcaatagggctagggggacatttattggcaggttacaaggaaatcgggcaacaggggtacagggagatcaggtggtttgattggagagaatcctagctgtacactagaggaaaatcaggcagctggaaaagggaaatttggcataggctgcaggaaataggggaaccagagggaaattggcaagcgtctggaggagactgggaggtaaaatgtgggggaaattggatgggggtggctagaagacaaaaggattaaattagatggaaattggacagggttagagcagaattgggtggtgaactggagagatgactggcagtgggaccagagtgaaatcaggcagaggattggggcaaaattgggcagggaggctagagcggagctgggctgcaggctggagggaaattgagtgggcagtgcaaaagggaaattgggcagttgggtataaaatgaaaccggcaaggtgtggtggctcacgcctgtaatcccaacacttaaggaggccaaggcaggaggctggactgccttgaggccaggagtttgagaccagcctgggcaatatagcaagagcctgtctctacaaaaaatttaaaaattagctgggcatggtagtgcacacctgtagttcctgctactcaggaggctgaggccggaggatggcttgagtccaggagtcagaggctgcagtgagctgtgatcatgccactgcactccagcttgggcaacagagcaagaccctgtctataagaaaacagaaagaaagaaagaaaagaaacaggatggattggaagaactcacgtggtgagctgttagagaaattgggtggtgggactagagtgaaaatgggcagcaggctatgaggacgtgtgagagggtgggctagagtgaaattggccaacagactggaggggtatcagtcaggtggctgaatgggatgtcagaccaaagggaattgggatgttggtgagagggagctcattgggtagaatgaaatgaaggagtggactggtgggaagtctagccccgcagggagtttggtgggggaagcacaggttgggggctgggcagcctgagacctgacccccacctgcctgccctgcaggatgatcccggcggagagccgctcgttcctgctgacggacctggcgtcaggccggacctacgatctgtgcgtgctcgccgtgtatgaggacagcgccacggggctcacggccacgcggcctgtgggctgcgcccgcttctccaccgaacctgcgctgcggccatgcggggcgccgcacgctcccttcctgggcggcacgatgatcatcgcgctgggcggcgtcatcgtagcctcggtactggtcttcatcttcgtgctgctaatgcgctacaaggtgcacggcggccagccccccggcaaggccaagattcccgcgcctgttagcagcgtttgctcccagaccaacggcgccctgggccccacgcccacgcccgccccgcccgccccggagcccgcggcgctcagggcccacaccgtggtccagctggactgcgagccctgggggcccggccacgaacctgtgggaccctagccaggcgcccccccctctaagggtcctctggccccacggacagcaggacccggacaccctgtgggacctggcctcaaactcaccaaatcgctcatggtttttaaaactctgatggggagggtgtcggggacaccggggcaaaacaagaaagtcctatttttccaagcttgggcgaa

SEQ ID NO: 598 - DNA, 336 bp, Homo sapiens
tttgaagctatggcattcccccactatgagcccacctgtcagccaggctatctgccttgatcctagatgaagtggccattctgcctgcccctcagaacctctctgtactctcaaccaacatgaagcatctcttgatgtggagcccagtgatcgcgcctggagaaacagtgtactattctgtcgaataccaggggtgagttttttcttttaatagttcttctcccttaagcagaagttggttcctgaaggcatagcccttcctcctgagcccaaggtggctttttgagtccagggatagattatccccaaagatctacccactctgtctgcataggc

SEQ ID NO: 599 - DNA, 336 bp, Homo sapiens
tttgaagctatggcattcccccactatgagcccacctgtcagccaggctatctgccttgatcctagatgaagtggccattctgcctgcccctcagaacctctctgtactctcaaccaacatgaagcatctcttgatgtggagcccagtgatcgcgcctggagaaacagtgtactattctgtcgaataccaggggtgagttttttcttttaatagttcttctcccttaagcagaagttggttcctgaaggcatagcccttcctcctgagcccaaggtggctttttgagtccagggatagattatccccaaagatctaccccctctgtctgcataggc

SEQ ID NO: 600 - DNA, 15789 bp, Homo sapiens
ggccgtggaggcagctcgaatggccaaactgatagcccaggacctgcagcccatgctagaggccccaggtgaggcatggacagctggggggagggcagtgaggcccctagggagctagagaggctcaggtgtggggaaacagatgagaagccctgcaagggaagtggggatgggaaaaaacaaggaatgagggtgcaaggaacacagggtgggggccagacctggtagtctggggagtgggacttgggaatgtatgcagtaggataatggggggtttggggtctggcggtgagaggctatgagcctgggaattccaaagtcctgggaagtgcccagtcaggaataaagctgcagccactccagcccaaggccagttaggcccctctgattctcagctatccctacccaggccgcagacccaggcaggactcagaaggttccgacacggagcccctggatgaggacagccctggggtatatgagaacggactgaccccctcagagggatcccctgaactgcccagcagtcctgcctcctcccgccaaccctggcgaccccctgcctgccggagcccactgcctcctggaggggaccagggtcccttctccagccccaaagcttggcctgaggagtgggggggggcaggcgcacaggcagaggaactagctggctatgaggctgaggatgaggctgggatgcaagggccagggcccagagacggttccccactcctcggaggctgcagcgacagttcaggaagtcttcgagaggaggagggggaggatgaagagcccctgcccccgctgagggccccagcaggcacggagcctgagcccatcgccatgctggtcctgaggggctcgtcctcgaggggtcctgatgctgggtgcctgacagaagagctcggggagcccgctgcaaccgagaggcctgcccagccggtgagatcctctgtccctgctgtgtgccctcttctcccaaagccttgcctcccaccctttccagaactgtctgatcaccgggggggctttttatctcactcggcttcctctgcctggccagtcttggaccacatcccacctcaaaaaaatagagggcgttcgagctggaaggaaccttacacacctgcaagcccaactccctcatttgacagatgggggaactgaggcccagagcacttaaagtaacttgcccaggccgggcgcggtggctcacgcctgtaatcccaacactttgggaggccgaagtgggcggatcacgaggtcaggagatcgagaccatcctggctaatacagtgaaaccccgtctctactaaaaatacaaaaaaaatttagccgggcgtggtggcgggcgcctgtagtcccagctacttgggaggctgaggcaggagaatggcgtgaacccgggaggcggagcctgcagtgagctgagatcgcgccactgcactctagcctgggtgacagagcgagactctgtctcaaaaaaaaaaaaaaaaaaaaaagtaacttgcccagggttgtaaactaataattaatgggagagccagaacatttttcccccgttctccttccatatcatttccagctctcagtttcctactccacccccacccccacctccgcactttctctctttggtgcccagaaataaaaaaggaaaagattgttccctccctaccctgactctccctccctctcccgggaagaagttgaaatagagaagaaggcagaaaaccgggagaggcggagtttgcccagaaccctctactctgattgggctctaggccttctgtttcctagcaaccacatcctcaccccttcatccctctgccttactgcagtactggctgctgctgccaatgtctgctactaaggccaggcacctcctgcctgggacacatgatatgctgatgggaggggactagagggaggaggtggaagggctgtccctgcattgaaggtgtcagaggaaaggtggggccctgcctgggagaagagggggttttgcaatccaaaacaaatgttggcgatccccctgctccaggctgtgcagggaggtgcctgagacccttcagctctgccacctcagtcagggcaggaaggtgggccctgtcctcggggactgagtctgcttccccctctgtctctctagggagctgccaaccccctggtggtgggagccgtggccctcctggacctcagcctggcattcctgttctcccagctcctcacctgaggctacttcctggcctggttctggctttggttgcgtgcctcttcacccctttgacctgccttttttctcttctcctcttcctggctgtgttttctcctatctttctttctcttcttcctttcttttctgtgctcctttgtttttttctctcgctttttctttccctgtcttctttcagattatctcatttcttctggatctgtctctgtattcctcactcccttccccatcccaaccccttctttctctagattgtttacatatgaagggcttttctctctcagagttgctgtcttctctgagacacacaaatctaagtcagaccattgctccacgccctcccaccttttctttagacctcaacttcgctgcgggtgggggtttggtgtcctaaggagactcctggaagctgaatggagaggaggaagaaaatgaagaaggagtgattgaatgtcgggcaaggcactggctgagctgctgtggctccctagcctaaggggcctgctgtccctctgaggcctagtgaaaaagctgcaggaggtgcatcctccacctctaatcttggaggctattatcttacctccaagcactgagctgggttactgcccaattccatccttccctgaaggagagaagggaagtgaaaagtagagtaactccccagcatttccctctttttctcctcatcggccagcccctcctccagccccctctggtggcatgccatgccaagagcaacgtgtaaaggaacagagaatatccaatgcagtcaagtccaccctgcccagactttgccactgacttctcccacccttctgtctcccccataatagtttatttggttggtctggactcacttgtggcctttgattaaattcctaaggggcctgaagaagacatttctactgcagagggttagaggcacttgagcaaggcccccacatcccaactctgggagttgtggtgggaggaggcacttctgggggataggaccagacaagataacaggagctcacatggaagcagaagctgtgacaagtttagtagtcccaaaatgggttatatcccttccccctttacatcagaatcttgtgaaatgggaaaacaacagaaggaggggatcaaagatagctgatctcacatgcttcccaggcagggcagaggtgggagtcaaacccgggtgacaggtgggtggagagccctgtttgaggttgtggctgatccctctctggtattagtttttcccctgggagcaggaagccctaggaagaggggactgcagggtccccaggggatctttcctccctcccctgcatgaggcagaggcaagctgcctgccaaccccctccctcaaggaatggccttgcccaggaatgcccaccacacataccctcttctttttttctagtcaaactcttgtttattccttggcttgcctccctccttcctcccctctcaacctttacttctgatttctatttcatggaatttgggattgaagttaaactacaacagtgccgccaacaccaagtcttgcaggaaaaaaatacaaagaaatttaacaaaaaaaatatattaataaaaaagttcaaaaaaggggggggattgtcatctcctttggggtgcgatggcttcaaatccaaactgaggctctccgggtggtaaggatgtgcgaggaggcctcttgaagaactccaggcctatcatgctgtctctccgctaaagcctgaggcccgaggtcagaggattcaggaaggctctgcagtcggcccaggagggcggggtcccgtggtggaggcggggagagggaaggaccgcacggagcaccaacccctgctcggccccgtaccaggaagcgctggggggcagaggagcggagttgaggcagaagccaggtgaggctggagtcctggggtaggcaggctgtcgctgccgctgccgctgcctgagatggaaatcgggggaggaagctcgcggaagaaacagcggagggtcgtggaaaaaaaagcaatggctgagctagggatggggtaccaggtagggggaggaaacggtagagagaaataggtggggctcccgcgcatgctcaataggaaggggcgccggtggggtgcggacgcatgcgtagtgggcttctcgggcggtggggtgggcgcggaatttggagacccacttcgggaaaggtaaaatgcgggcgcaattttagggtacctgtgggacccgggctcttagggtcttgacacaggacgggcctgggccgaaagcccaggcacgcccgaccagagagtgtttctccactcccggactctgccagtcaggatggtggtgccttcgctgaagcttcaggacctcatcgaagagattcgcggggccaagactcaggcccaggagcgggaggtgatccaaaaggagtgtgcccacatccgggcctccttccgcgacggggacccagtgcacaggcaccggcagctggccaaactgctctacgtccacatgttgggctaccccgcccactttggacaggtactggccaggaatacctccctcctgagcttgatgaaggctagtggggcagagtcccagactctctcacctgtttatgccctggttttttaaattctacaatttcagagtcttcacagcctgcactgcaaacctctttccccattgctacccctactggtcatcagctggcctgaacccttcattctctggccagcctcctttagggcaggcatctcctcctctccgctcccatcctcctcaactcctagttcctcctacccactaacgcctgaatttcctaagcttctcctcttgttgaagggagagtgatgagatatgatgccccacaggttaatctggttttaaagaggaagatggaacagggatgtgagtgtctatggtttcacccctgcctcttcctggtctgcccccttcactatagatggagtgcctgaaactgatcgcctcctccagattcacagacaagagggtgggctacctgggggccatgcttctattggatgagaggcacgatgcccacctgctcattaccaacagcatcaagaagtgagagggttctggcaatcacttggaatcagggagatgggagagtagggaccttggaaatcccaggggactgcctgttgtgggtattgaaaaggactgattttctcagaggtttgactgaccgtcctcccaaaccctgcagtgacctgagccaggggattcagccagtacaaggcctggccttgtgcactttgagcaccatgggctctgctgagatgtgccgagacctggccccagaggtggagaaactgctcctgcagcccagtccctacgtgcgcaagaaggtgagatggcgggactcctggcacgtgctcctgcacactgcctgctgcgtgctatatagtagtagatgcaggggtccatctcctctgacccctgtctgaggcccctgacctctgcaggctattctgactgcagtgcacatgatccggaaggtccctgaactctccagtgtcttcctcccaccctgtgcccaactgcttcatgagcgtcaccatggtaaggctgtggggccccccatcctttgcttcaggtctatggacagaagaattgaaaatcggatgggaaccccagctcacaggagaagggtagtgcacacacacaggcacacacgcaatagactctcttgcccctggcccccaccattcacttccccgacgctgaccccaggcatcctgctgggcaccatcacgctgatcacggagctctgcgaacgaagccctgcagccctcaggcacttccgaaaggtgggctggtgaaggggcaggccctgggcctggaagacagggtcagtggggaaggaatggggctttagctggagaggattagaacgaatgcccaaagttgtgccctccctccaggtggtaccccagctggtacacatcctccggactctggtgacaatgggatactccacagaacacagcatatctggagtcagcgaccccttcctgcaggtggggtgacctttcactgctgtatccctggatcagagagggcatagcagtaagaccatgaccagtggtttcctcccagagaacactggttctctcagtgtcctgggcagcagagtagcaggcacaggattgctcgggtcatcccaggacctgtgaggggagagggaatgcctaaaagtcaggaaaatacagtttgttaacaattttttttttaagcctgtcctaaactcccctggcctcacacacctctgttcccctcctaggaccaagggacctgtggaggtgaggaggtgggggaaggctctagggagcgagccagaccctcacatgttggagttttctcctcagccccacgactccttatcctatgaacccctccaactttccattttcaacccaacctcaggtccagatacttcgtctgcttcggatcctgggccggaaccacgaggagagcagtgagaccatgaatgacttgctggcccaggtggggcctgggagggcactggttagctgtgttgcttggagaccccatcagccctgggtgcccctcacatgactcgtcactgtgcagtggccgtgtaattgcctctccatctcctctagacagtgaactccatgaagaagggacacagtctgtcttagtgctattgccccagtgcccaggctggccctggcacatagtagagcctcagggaactttgttggatggttgaaggatggacagataacatgttggagtccttcaagaatcctgaggattacctgggcttgttggcatgtgcctgtagtcccagccactcaggaggctgaggcaggaggatcatcagagcctgggaggtcaaggctgcagtgagctttgggcgacagagtgagaccctgtatcaaaaaaaggagacctgaggagggccttgagcagatacatctcctctctcatccactcaggtggccactaacacggacaccagccgaaatgccggaaatgcggtcctgtttgagacagtactcaccatcatggatatccgctctgcagctggcctacgggtatcaccccttatgcctctcccactacggccccgcccaccacctcacccacacaggtcctgcttgctggtttctccctcctagccccatcatcttgcgccaatgtgttcccagtcctcaatggctgagcaggttgctcctttccgactgaccccaacttctgcctctcataggttctagctgtcaacattcttggtcgcttcctactcaacagtgacaggaacattaggtaatagtcccaactgtctacctaggctgtgccactgatcccctggccctctgccctccttcctccagagcctcctgatccatttctctcttatcttatccctatacccaggacaggacggggagtgggggctgatggccatggtatgatagaacctcccccatcctgaccaggtatgtagccctgacatcactgcttcgactggtgcagtctgatcacagtgctgtgcagcggcatcggcccactgtggtggaatgtctacgggaaactgatgcctccctcagccggtgagcagtgatagaggggacaggagggcagggcagaggttcccagtgccctgtggccaagactcgagccagtttagagcagctggagtaaggggactaagggggacaggtccctggggaagcagagggcctgaggcatggaccaggatgacctgggctacctgcatggaaacctctttctcctgccaggagagccctggaactaagcctggctctggtaaatagctccaatgtgcgagccatgatgcaagagctgcaggcctttctggagtcctgccctcctgacctacgggctgactgtgcctcaggcatcctgctggctgcagagaggtgaggtgcccaggagtcgaagagggtagaatctggggagcgtcagtaccaggactgatgagccatatatcccctaggtttgctccaaccaaacgctggcacatagacaccatcctgcatgtgctgacaacggtgaggcaggggccagtcagagagctgggcagaagtggtcaagattcaccacactgacttggccatgcccacaccttccaggcgggcacccatgtgcgggatgatgcagtggccaacctgacccagctgattgggggggcccaggagctacatgcctactctgtgcgccgcctctacaatgccctggcagaagacatttcccaggtaccattcccacctacctaggcccagggctgcccaaccactcccttgcccatcctgggccacctcctccctactagattccaatttttctctcaaggtcacagctgcttacacagtgcagaagacatctgagcacagagccctgtttttaagaacatctgggcttttgtcctgactctggtacctcctggttatgtaactacagatgactaacttcccttatgctccatgtaccctgactgcctcttagagctgccttgagattaaagctcttgtgtttatgaggttttattattaccttgaatgctgaatgaattaacagatgccagccagtatctatagcccccttttccatcttaattaaatagggtgggcagaaagcatcatccaccccttccacaagggagggaccctctcacatttccatcctgtttggttaggccatgtagttctgatgcttggccaccagagggcagtgggagccaggtaacaaacttccctttccccactcctccaaccccccaccatctctgcactgcctaaagggatattgccaggtctggaagtgaggaggggacctcagacactggcccagcagtgtttctttctttctctctctctctttttttttttaaaatagagatggggggggtctcgctttgttgcccaggctggtcttgaactcctggtctcaagcaatcctcccgcctcagcctcccaatgcgctgggattacaggcttgagccaccatgcctggccagcccagcagtttcttatcccatgtagcaaccactggtgcaggtggcagcctggtgcattggggagtatggggacctcctgctggcagggaactgcgaggagattgagccccttcaggtgagacctcattgggggtacactgaggagggacttgtcagggggacaggacttgcaccagggccactaactgtatccatgtctgaaggtggacgaagaggaagtgctggcattgctggaaaaggtgctgcagtcccacatgtccctgccagccactcgaggatatgccctcacagccctcatgaagctcagcactcgcctctgtggggacaacaagtaagaaggggtcccagccccttgagagatggcctgtcactgggtccacccatttttgagtttctttccaggcatacatgcccagccctccctaccccctagcccttaggttcttgtttttgagccaaatctgggtatttccctgctccgtgggcctttccttcttgccacatcctgcagtggcacactgccatagccacttacatactacactggcccagccgcatccgccaggtggtgtccatctacgggagctgcttggacgtggagctgcagcagcgggctgtggagtatgacacactcttccggaaatacgaccacatgaggtgtgtccagcactgtgctgcagcatgggacccaaacccctgccctctcccaaatgcccttttctaggtacaagggcctcatcctcacctgtgttcttccatatccacggtgagagcttcccacccactgttaattgaagctaagctggcttccaaccctccttgttcatctgaaaatcagcaacaacatgtcattttaggaaatcagaagggtacttctgagccaccatgtgcccagggctccatattcctagtcctcatcctagatgcctcttgtgaaaggcccagagaccacacagaggcacacttgcattccatcctctcagggctgccatcctggaaaaaatgcctcttgtggagcgagatggccctcaggctgatgaggaagcaaaggaaagcaaagaagcagcccagctttcagaagcagccccagtgcccacagagccccaggtgagaaggctagaaactctggggtaggaagacgggctgagcttcatacccagccctgccccttctgtcccttctgccaggcctcacagctcctggatctgctagatctcctggatggggcttctggggatgtccagcatcctccccatctggacccctccccaggaggtgccctggtacacctgcttgaccttccctgtgtacctccacccccaggtaagcctaagcaaagggaagatgtcttagagaaggtaggtggaaatgtactgctcctcctcctaagccaagggctgaggctcatggaccctgcttcttcctgtgtgtcccccatcccatcgccatctcaggaggtaaaagaatgaagtcaatcatggtcatctgtcttccctttgttccagacttctttccctggcctacagggccctgcttcctccccaacccttcttataccactttcccactacccactcactgcccccttctcagctcctcacaccctcccacccttggcatttcatgttcttttttacatggaatgttctttccccagcacatcaaatgaccagctcattctcactcttcaggcttcagctaaaatgtcagatgccttcccctaccactcctatttaagtcagttctccccagttattctggcatgacttacttccttcatagcatctattatggtctgtaattatcttgcctttttttttttttttttttttttttttttgagacagcgtcttgctctgtcacccaggctggagtgcagtggcgtgatctcggctcactgcaacctctgcctcccgggttcaagctgttcttgtgtctcagcctcccaagtccgggcctcaggtgatccacccacctcagcctcccaaagtgctgggattactggctcacgcccggcctttttttattgtttctctcccccattagacagtaagctccatcctcatctacatgtctactttgttactagcctttcgagtagtgcagggccagtaggtgtttactcaatttttgttgaatgaatgaacaaacatgttctctcaaacctgcacactgagctgcttctgtctccctactccagctcccatcccagatctcaaagtgtttgagcgtgagggagtacagctgaatctgtctttcattcgaccccctgaaaaccctgctttgctgttaatcaccatcactgccaccaacttctcagagggtgatgtcacccatttcatctgccaggctgctgtgcccaaggtttgtaaagatcagagttcagaggtggcctggggactccaggagaaaaggccactaagtggaggaggtgggtgggagacagtgtgagatgggattgagtcatctggagatcagcacttggggagttacaggaaaagggtgtggagccactgagtatagaggggctgcctgagccctacctactgccatactgtgctctgttaaactcctgtgttcagagtctccagctgcagctgcaggcccccagtgggaacacagttccagctcggggtggccttcctatcacccagctcttcagaatcctcaatcctaacaaggtgagcttcaggagttcccccaagacaagacccagggatagaagaagccgtgggtgctaaccctggtccctgctctcctattcctaggcccccctgcggctaaagctgcgcctcacctacgaccactttcaccagtcggtgcaggagatctttgaggtgaacaacttgcctgtggaatcgtggcagtaactgtctccactcacagcctgaaattctcctgtgtcccaaaccccagggggccccagcagcttcgaacctacacctgagggctaccagcaggtggcgctctggctttgcactgcaaaaactggggaccagcccccttctcccacaaataaagcccaataaagcctgagaagtgaggaaagccatatttgggtatatttgaagtggaaagtgtgtatgaataacagcaagggaagagcattcttacataggaggtatgcatcttcccctgagccttgagaacctgtctcaacacgggggcggggagggggcagctgttggttctttctaaccctctccaggtcagggaacaaatttgcccctaaacttccacaggaggcactctaccctctgggccagagctgggcacagtggcaaagtcagattagaatttctagagttctaacagcgattcccaaccatttcctcaacttttcttctgtttcccacatcccaaggcagggaaatccctgctgcctctcctcatcttctaactcagctgtaaggcggtttaggagccgctggcagaatcaatggcatcgaccaagggagggggggtggcaagggattttcctgtgcttaactactgatcacggctaagtggaaatcctataaacacgagcggaaatcaatggaggctgcttagcggccaggggagaggggcggcccacagattgcatctgacggatgagcgagaggaagcagccagggagggctcaaggaagagtagcttagaggagggggaagaaacaggcagcgctggagagagaggagtcactgtcagaagggacactgaggggagaggcacagtgggcccaggagtggactccgttagacccagagttcccttccccttctaggaagtgacacccctagcccaggcagtggtcaggatcttcagtctcctgtggcctctctctggagctgttcacttctagcaggcgctgatagtcttgaggccggaaacgctgtagatacacaatcagcttggctggtgctgtctcctgtgcaggcacacctacaggtaaaaggacaatgaggagagaaatggacagagccacaagcacttggactctgctccctgcccacctagccaggactccgtggatgtttccaaagccacactggggttctgaatgtcacccacccagcttctgtaacacactagtccactccctgcctgcctgtggaagtgggacctaaaagagcaacttcaggcaagagtgggactagaagccacacctcagcctctctcctccagcaaggagaaatggcgaagaggcacccaggcaccaagataaacgaaggatgcctcagcgtcagctcatttcagttattaccctgttccgcaatcaagattaaagccctagaccaggccaaagctcattagcttagtaatgaagcacatgcagagatgtacacatagaaaccaagagctatagaaagaagaggagggaagctatagccatggggtgggattcacatagaattctcgcctctacatggtgaggtgagaatggaactgcctgttgccagtgtcttgttgttagtgcctggcagcatgctgggcacatagcaaggaactcagtgtatgtttgctgagggggctcaaacagcactgcagggctgtaaggccccatgggatgcacaattcctagtgtggatgaactgtctacaagggaattatgcttaggaacaaatctgccaaatcatgccccactgtctcacataactataatgttattgtcctttacaaaaagccaaaaggacaaattaaaaggatctaggtaattgtaaaacaaaaggacaagactggttggactctcagtgtagtgggcagtgcatcagtctcatgatctgaagatcctgggtctgagcctcccagagggcagcttttgtaaaaaggcttactttttactccttgtggaggagtggtgactgaagaagaagaaaaaaaagagattgggggaaggaagagtcaaagcagggaactgagaaatgaaactgaaggagatctggctataggtatgagaactaaatgaggcaggttggctggaattagacacgtggaaggactagatccaaattagctactgttaaagagaaaacgagatttcacagaactgtaagcaaacttagaaaattgctaaaacaattcccattacaaaaataatccaggccaggcacagaggctcacacctgtaatcccagcactttggaaggccgaggcaggcaaattgcttgagtccaggagttccagaccagcctgggcaacacggcaaaaccttgtctctattaaaaaaaaaatttttaatccggaggccctcccccactgcatggtccagcaggtgcctccaaaagagaaaagtggggagcaggaaaagcacaaaagggcctgtctccctcaccaagcatgctgctgagcctgtggatcttctctagggcagttggtacttcagcctcctcatgcaccagggcctctacctcacccacagcgtagccaaagtcggctgtatccaagtccaccctgagctgtggctcctcttcatcagctcccaagagcaccagcttccaggcactccgcttagtcacaaaactagctacttcctgcagccccagtgggcccagcacagcagccacatctccagcccccaggccgtcagcccgcagcaccttacagagttgggccacaattgtaggttccgctgtgagttccttatactccgtgtggggtcctaagacacctgctgctccaggacatttgagctcccatccactatcctctcgtcgtcgcagccagtggtcagcctgcatgaggctcagctcaggggtgtcatagtaggtgtctcggaaggtgacccggtactccagggtgccccccaactcctgcagccgctcctctgtgccaggccctggaaggaactttcgctccacctcaatcaagccctgggccatgctacctgcaattggctgaacaaacgtttgctgagttcccaaggatgcaaagcctggtgctcagctcctggggcgtcaactcagtacagaacccctccctggaaaaacttatgaggggcacactgtgtcgcaatagtctctagggctactgccttttctctctacctcggtgacattaaggccccgtcggtgatattttaaggctctgacagtgacaggtctccagtaaaatcccttccactgctgctgatgtcctcaatccaaagagacccctagaaagcaggccgggtagcgggtgtcctttcaacgcccccctctctacaccttgccaccccaggaggctactggctcacgacccgggaggacctgccctttcctgctacactaccggccagcggaacttcaggtctcacctcaaagcccgagagtctcctcgcgggacccacagagggggaagggagcccacgccatacactcgcgaggaatgccgggagcagttccggatcccggacctcggcccgaccctccgcgcgcccggcaggtcccggcaccagcggccatattacgcccgttgtggcggtgccgagagcaggccagggctcgagacacgcgctatgtaatgggaggccgcgacccccgcggtggccaggggagcgaggccgccccttgcattctgc

SEQ ID NO: 601 - DNA, 410 bp, Homo sapiens
ggccctttgaatgctttgggagacaaaatattaatagagatgattccttcttactccctctgaggactatggttatctggagactctaactatatgtctgaccttccatgtgaggaagctccctgaggaaccgtggctcttaactcctggactccttcctatgatgggtgagaagtgccatgttctcaacacctgccctctcaccagtatgtttctggaaatacatgaccagtgagaggtattatagggagaaggacactggtttaaagacatggcattttggccaggtgtgttgactcacacttgtaatcctagcactttgggaggtcgaggcaggaggatcatttgaggccaggagtttgagaccagcctgggcaacataggaagaccctgtttctacaaaaaaaaaa

SEQ ID NO: 602 - DNA, 1140 bp, Homo sapiens
aaacaaagtatttatgtctgttgtatagtatggatgcttgctcttggtggattcctaactatgattattttaacacttaagaaaggagggcataattccacaatgtgtttccattacagagataagcataacgcaaaaggagaagccatttttaacttcattcttgtggtaatgttctggctaattttcttactaataatcctttcatatattaagattgggaagaatctattgaggatttctaaaaggaggtcaaaatttcctaattctggtaaatatgccactacagctcgtaactcctttattgtacttatcatttttactatatgttttgttccctatcatgcctttcgattcatctacatttcttcacagctaaatgtatcatcttgctactggaaagaaattgttcacaaaaccaatgagatcatgctggttctctcatctttcaatagttgcttagatccagtcatgtatttcctgatgtccagtaacattcgcaaaataatgtgccaacttctttttagacgatttcaaggtgaaccaagtaggagtgaaagcacttcagaatttaaaccaggatactccctgcatgatacatctgtggcagtgaaaatacagtctagttctaaaagtacttgaggtaaacatactaaaatgaattatataatgcagcctcttaattctttgaagaactaaaaaattaggaaacaaagttctagcatttacaaaactcagatctcaaagctctgcttgtatttgtgatatttcatttgcttaactgtaaaccatttcaaggtactaacttttaaatctgtatgtaaaatcttttcaaaatacatttttaagctaatactcttaacatagattatgaagttaagtgaaatttatggctctaacagcaaaataattaaagtgccatagtttctcaagtgactaaagtagttattaaaatcaagcacttgatactaatttgaagtgtgtttaaaagtaaatgatttgggaactgacaatgtgtcagaaaatatatgttcatttatcattttaaaatcttgtataatttgccactgtattcatttatgcctaaatctctataacagatgaaaagataattaataaaatcctaattaaaaaatgaga

SEQ ID NO: 603 - DNA, 6312 bp, Homo sapiens
  misc_feature (6195): n equals a,t,g, or c
cagttaatgcaattttgaagcatgccctgaatagattcagtcattatcaagtcaaactaaaaacggtgaaaggttgcgactattaccaaataggtatgtatttcaacatagcaatgtgatattttcacaaacatacccaaactgcattttaaaagcttctgctcatctggagtcacagtggaatctgttgggtcctgccctctgggtccagtactcctacatgagccagttgaaaaaaaactgcaggagtaggtggtggtgcgggggtacaatgcactaatactaggtttttgaacttgtgaataggatttgccaagtaacaacatttaaaaaacactatctactattacaaaactattgtgaccacttcaatatagcacatgggtcacaagtaatgcccactgggaaattaatcccctatgtaaacacagtggtttgtttcttgtcttcacaagcaattcttaacatatcaaacaggtagtttaaaaaatatcagtaaatagccttatatagtgaatgacattgtaatgtactaaccaacttcaaaggagaaaaaaaaacagtcaccaagtttaaaacagaatgtaattgtgatttttaattaaaaaaaaaatttttttttgagacagactctcgctctgttgcccaggctagagtacagtggcatgaacacagctcactgcagcctctgtctcccgggttcaagcaattctccagcctcagcctccggagtagctgggactacaggtgcgtgccaccacgccctgctaatttttttttttttttttggtattttttagtagaggcagggtttcgctatgttggccaggctggtctcgaattcctggactccagtgatttgcctgcctcggcctcccaaagtgctgggattacaggcatgaaccactgctcccggccaattttttttttttttatgttctttttttttgagacaaggtcttactccgtcacccaggctggagtacagtggagtgatctaggatcactgcaacctctgcttcccaggctcaagcgatcctcccaccttagcctctcgagtagctgggactataggcgcacgtcaccatacccgctaatttttatactttttgtagagacagggtttcaccatcttgcccaggctggtctagaactcctgaactcaagtgatcctcccacttcagcctcccaaagtgctgggatcacaggcatgaaccatggcgctcagctgtcaatttgtgaatcaataattgtatgctagctgtctaatacatagttctaaatgatggccactattataacataaacaaatgcactggctttgctttatgctctttaaactgaagactaaagcaaaaccagaaatgcttactgacagatttgtccaactattacttattttatttgcagattagagctgaggcaaatggtttcaggatatgtgctttgtgctaacagctttctggagacatcttgattatggctatcgggtctagaagtttaaaaagatatgctctgtgggtagtggcaatcattctgatgaatgatttgtgattctgtaaactctggatttacttccttataataatggacatagcaaataagattaataccctttccaaagaagtaaagctagatggcataacctgttcttaaaattgttaaagtgtatgttaaaggaatcatgtcaaaatactgctgatagaactcaatattaataaagaaaatgctgaccctatgtgataaggagtgagatttggtgaaaagcatcatgggctctaaaagtcagatctgagtcctaacttgggcactgtcatttaagagttgtgtggcctgccgggtgcggtggctcacgcctgtaaccccagcactttaggaggcagaggcgggcggaaaatgaggtcaggagttcaagaccagcctggccaacatagtgaaactccgtctctactaaaaatacaaaaattagctggatgtggtcccagctacttgggaggctgaggcaggagaactgcttgaactcgggaggcggaggttgcagtgagctgagaccatgccattgcactccagcctgggtgacagagtgagactctgtctcaaaaaaaaaaaaaaaaaaaaaaaaagagttgtgtggccaagagtaaagatcataacctcttgaactttctttctttcttcctttttttattttagagacaggttcatgctatgttgccttggctggcaggctggtcttgaactcctggtctcaagtgattctccagcctcagtctcccaaagtgttggggttcccacgcgtgagccactgtacctggccaaccttttgatctttcattacctcttttgtgatacctacctcacagagtattgcaagaattatgtaaaggaagtaatataaatgtgtttaacacagtgtctggtacacagaaagtactaaataaatattagttaatggtttggccatctagcttaagagttcaattctgactgcacattaaaatcccctaaggagcttttaaaggaaaccagtgcctgaaacccattccagaccaattaaatcagaatatctggggaaggagccaagcactggtatctttaaaaaaccctcaagaggattctaatatgcagccaggattgagaaccactgataatcccttctacaaagaacccaattggtggtagtctcaaaaatctccagtggtaagatccttatattgcctcccaagagagatcatttcattagaaaaaaatgatttccttaaaaggaggcaacatctgtctctgcaatttctatcattggttcttgttttgctttgtgaagacacatataacaaagtgaaacccttttctctatggctttgtaaagcattctcatctccagggtaacgtgcctatttccttcaacttgcttctttgacatgatttgagttcttctctccatttggtccatggccttttctaagtgtgctgctgtggatcaaacactgcattccaggtgagaccctaccagcctgggacagaagcagcatagtagtaacaattttcatttcagacatcacgtatctaggaattcaactaaagatgggtttttcgttgccaccacactacgctagtgatagagcaattgcaattgtgtttgttaatgcagctaaagctcttcctgtacttgtacagctgcttttaatatccacatgtagaacttcatatacatttctactaaattccctctttgatttaataatatttattatgctaagcattaggtacagagagccgaacaaaattgacttggttcttaatcctaatggaacttaaattctaacatgagagaagaaaaaaaatccaaaataactactcacaggtgagtttttcacgtcatttcagctacttgagctctcaaaatcacattacttcttgtgcctcaattccctgaacctatgagagctccctacataaccacacaatataggtggttcctctacagacacccttttccttttcctggtaatgcaggttgcattatcagtttcatttttggtagcctgacattctttctagattgccctttccttttagaatcttagatcacaggttgggcatagtggctcacacctgtaattccagcactttgggaggccgaagtgggcagatcacctgaggtcaggagttcgagaccagcctggccaacgtggtgaaaccccatctctactaaaaatacaaaaattagccgggcatggtggcgggcgcctgtaatcccagctactcgggaggctgaggcaggagaatcgcttgaagccagggggcggaggttgcagtgagccgagatcacgccattgcactctagcctgggtgacaagagcaaaactctgtctcaaaaacaaaacaaaacaaacaaacaaacaaaaaccagaatcttagatcacaagaaacatgcctatacctttctataaactttctgaaatttgtcttcctgcagttgagacacatgacagactagactcagtccttccccgctcccttcctttctccctccactttcctgaattctggaaacaggctcttaccagggattacataacttcctcttcaccagccagttcctcttctgtggaatcaatgctccccaactttacaacattttaaatcttaatgttaccctctaccaaaatgctttgtttttaatcaaattatgtgtagagctttaagaaaggctatttttctctgtgtataagatcaaatcagggacttaatttatgtaattcaaatccactttgcatggtagcagtcagggtttgaatgtccactcctccaaaatgtttactaatagggtctctgtcttattcaccttcctttcccacacagtacttagccaagtgtgagatatttactaaaatgagattaatcaaaaggtgtttattaaagctaacttttattaagcagtcactatgtgccaggattaagttcttcttatgcatttttcattttcacaaatgagaaaactaaggcatagaaaagattaagttatttgcccttggtcacaagttagttgggtctgattttgagaaccttgctctgggcatctttatgttaaccctgctaagtggctgctgtagagaaatagggcagtcactctatgagaggaatgtgatgagacctccagaaatgctttctttacttgttatgaccagctctcagactaagctctttacagcagtcaatgggccaataataagtagctttgcaaatattctctgctgccacaaacaagtagaattcaaacactatctcttcgaaggttctagcaagtctcaaattattgaacccagggcacatttaagctttggtcaggttactttcaaaatcttggattgcacatgctgtttcccatctacgttattactctatgcttctaggttaggagtggctaactggcagctgccagctaacttggttttgtttggttacttttttctcctgtccagtgatacaagagtctgtgtaaccttgcaggtgctgtattctcttagtctattatgttaattgcatgccctaagacccctaccttggtcttaggctgaaaagaaatttaggatcctcttctttattcccacttatagaatgagaccaccacaagtcacacgccatgtagcaatacatgtcaaaatgaatgaatgccacatatgagggaaaaagtcaaggcaggaagtggttctgaagctgggcagggccagcagtgggcccagctctcttatggctgtacatacctttagagaaactgatgctcatctttgagaaatatgagctgtcatttctcttcaccaccatctgtattcccataagaacttccctaagagaagatgatctcataaattgagttattttaatataatacatgaaacagaacttcaatgtaggccatggccacaggaaaggttagagcatgaaactccatgagataccacactatgtgctgcttgtttaatgatacaataatgttactacatacagtaggataaaagtaaagtttctcgcaatgtctgaaaataaatcatttattatttacactgtcttttttttttttttttttttaaagagatggggtcttgttctgttgcccaggctggagtgcagtggctcaattatagctcactacagccttgaactcctgggttcaagcaatccttctgctgtagcctcccgagtagctaggaccataggcgtgtgctgggaagcccagcctattatttacacttttagttaaagtaactgttattaaaatagcaaatgactcaatgtttggcattccgttgtaggaaaaatctgaagacataagaactacacatgaggaatatgtcatttagcactttcactttttgatctccacagaagacaatgagaagtcataccataacaatgacgacaacttcagtcagcagctggccttactcctcccacagaatgcgctttataaccaatcatagcgaccaaccgccacaaaacttctcagcaacaccaaatgttactacctgtcccatggatgaaaaattgctatctactgtgttaaccacatcctactctgttattttcatcgtgggactggttgggaacataatcgccctctatgtatttctgggtattcaccgtaaaagaaattccattcaaatttatctacttaacgtagccattgcagacctnctactcatcttctgcctccctttccgaataatgtatcatattaaccaaaaacagtggacactaggtgtgattctgtgcaaggttgtgggaacactgttttatttgaacatttaattt

SEQ ID NO: 604 - DNA, 32121 bp, Homo sapiens
aacttcagcaaagtctcaggatacaaaatcaatgtgcaaaaatcacaagcattcctatacacccataacagacagagagccaaataatgagtgaattcccattcacaattgcttcaaagagattaaaatacctaggaatccaacttaacaagggatgtgaaggacctcttcaaggagaactacaagccactactcaacaaaataaaagaggacacaaacaaatggaagaacattccatgctcaaggattggaagaatcaatatcttgaaaatggccatagataatttatagattcaatgccatccccatcaagctaccaatcactttcttcatagaactggaaaaaactaaagttcatatggaatcaaaaaagagcccgcattgccaaaacaatcttaagccaaaagaacaaagctggaggcagcacactacctgacttcaaactatactataaggctacagtaaccaaaacagcatggtactggtaccaaaacagagatatagaccaatggaacagaacagagccctcggaaataataccacatacatcttcaaccatatgatctttgacaaacctgacaaaaacaagaaatggggaaaggattccctatttaataaatggtgctgggaaaactggctagccatatgtagaaagctgaaactggatcgcttctttacaccttatacaaaaattaattcaagatggattaaagacttaaacattagacctaaaaccataaaaaccctagaagaaaacctaggcaataccattcaggacataggcatgggcaaggacttcatgtctaaaacaccaaaagcaatggcaacaaaagccaaaattgacaaatgggatctaattaaactaaagaggttctgcacagcaaaagaaactaccatcagagtgaacaggcaacctacagaatgggagaaaatttttgcaatctactcatctgacaaagggctaatattcagaatctacaaagaacttaaatttacaagaaaaaatcaaacaaccccatcaaaaagtgggcaaaggatatgaacagacacttctcaaaagaagacatttatgcagccaacagacacatgaaaaaatgctcatcatcactggccatcagagaaatgaaatcaaaaccacaaggagataccatgtcacaccagttagaatggagatcatcaaaaagtcaggaaacaacaggtgctggagaggatgtggagaaataggaacacttttacactgctggtgggactttaactagttcaaccattgtggaagacagtgtggcgattcctcaaggatctagaaccagaaataccatttgacccagccatcccattactggggatatacccaaaggattataaatcatgctactataaagacacatgcacatgttatgtttattgcggcactattcacaatagcaaagacttggaaccaacccaaatgatagactggattaagaaaatgtggcacatatacaccatggaatactatgcagccataaaaaaggatgagttcatgtcctttgtagggacatggatgaagctggaaaccatcattctcagcaaactatcgcaaggacagaaaaccaaacactgcatgttctcactcataggtgggaattgaacaatgagaacgcttggacacaggaaggggaacatcacacatcggggcctgttgtggggtgggggggacgggggagggatagcattaggagatacacctaatgtaaatgaccagttaatgggtgcagcacatcaacatggcacatggatatatatatatatatatatatgtaacctgcacgttgtgcacatgtatcctagaacttaaaagtattaaaaaaaagaaaaaaattgtttgccccttgttctttccctgcaaaaccccaatcccgaattggtctaaccactcatttttctatggttaagcccagactacagattgctgtgggaaaataactttgaagagactggtctcattttcagttcatggcattcatcttcaaaggctcctccccctggagctcccagtcaggctctctcctttcatttccaccaatggcagtttcatctccttattcaagtgtctcacactgctactgtcagccaaaaagccattattatgaattccttcaattttctgacagcactttcccctccagttgtatctggattcatcaatggttcttaattttgcctccacaggaccacccttcacctctcctgtaacttctcctttcccaccaaattgctttctcccctccacccctactacccattaaaaatactttctcacctactcccatttacctactattttccttccaaagacagctgcttgaaacagaagttactttgttcattttcctcactattcattaataactcttgcttttaccaccctatgtcatcgtctcctaattgcagactccaaaacaggtcagttccttctcacctgacctctccatgttattaatccctttaaaaaatttacatgaaggtattcacaaaaatccttctaatggacagaactaatttctctttgacttcctctccactccacactgtcattttaatgatgatataactgggtgtcctgcctctctcatctcatcctttgctattgcattgttcttaatgtttctaggataacttttaaaaataaaaatatgattgcgttatgcccctgctaaatctcaataatctacatagcctctgaattcctcatttatttcaggaagaaactcaaactctaacatggcatatttaagatctgcaaaactctaatattttctcctaacttctgtgaggacttctttccaatcctagtcttgagacatgttgaactaatactattcctttcaattattgttttggttaatgtgttattgttcctcaactgtatagaatgggtgatgctccactaggaaattcagttaagagctcttccaagatgcttttccagattcccccagcctcaagtagggtgcttgttctgtggcactgcagtaccttccatattctaacacagccctcgcttacaatattttaattactaaaatatttatctctttccatcccactagactgtaagctcctcttgaaagctaagtaatggcttctctggttccacctgtaacattaaaaaaaatttttttttggtagagacgggatctcactatgctgcccaggttggtcttgaactcctggcctcaagcagtcctcctgcctcagcctatcaaagtgttgggattacaggcgtgagccaccacatctagcttctacctgtaacatttagcccagtgcctgaaatgtagtagagaatcaatgaatggtgaatgaatgaacaaaataataatcaatgtcctttaaaaaagcacagactatttcacttttggtacattccaaattgtaattttattttaccccaacagacaagtttctaaaatttccatagaatccctatggaatcatattcaagacaaggccactttatttcctgagaagtattagaaatattagaaagacgctgcagaagtctgagttaagaacctaatctataacagctcatttatcacactaagaagagaataagacggttcatgagattctgcttctttaaactaacataaactaaggatacatcaatagaaacaacctacagatcagaaaaagtttcctatgtggtttggaatgtgtcactttaattttattcactctaactttattcattttaatgttgtttataaaataactctattaggacagagactttgactattttaagtggtatcccagcacctgtaaggagatctggcatatagtagttcaataaatctttcttcaataagtgaatgcacgtaagtatttagcttcaaattcagagataagtgaaagaatttttctagcaaaagcaaaataatctaaacatttgtctaattacctttttgcaaatctgtttcattgtgacttcttccaagttagcactggccagtaatttctttattgtttcctttaactcttcatctgtagggggtttcttcaactttttaattaaaggttcatcatctgaactatcctcagactcactttctaaaagtaatataataataataatttttcttacatagtaaattaacatttaacaaaggctgagatgaattttaagctttcaacagattctcaaaggggtactggatcaaaaaaattataaatcactactctacagttacctataaaacatgcatacaaattttagtcaatttgaaaaatcaaaaactataaaaaactggtatacaggttaggcatccctaatccaaaaatccaaaacctgaaatgttccaaaatccagcttttcagagcaccaacatgacaccaccaggaggtaattccatacccgacctcgtgtgacgggtcgcagtcaaaacttggtttcaggccaagggcagtggtccaagcctgtaaacccagtgctctggggggccaagataggagactcgcttgagtccagcagttcaaggctacagtgagctgtaacggcaccactgcaataaataatttatttagttaaaatattaaactaccttcaggctatttaagatgaatatgaaacatgaatgaatttcatgtttagactgggtcccatccccaagatatctctctctctgtctctctctctatatatatatattgcaaaatctgaatcacttcctgtcccaagcatttcagataagggatattcaacctgtattacttctccccgcaatgttctctgcagtttacctgtttctcccacacacttaaatactatgtacaacatattaatatatgctatatctttaaagttgctgattaatgttatttctaacataccttttttggaactgttttgattcttcttggtggtgctgctatctgctttcttaacattggcacttttcacagattttttacttttagaagtagctttctgtttaggtttttctcttttggctgtcttttttggtggctgttacaaaagaaagtaaaagtacacatattgatgagattcaatgctatcccatcccatccctctacttcccctatgccccttaataatattagagaaaaccaatatatttggtatcagcaattaaaaattctttttgagagatgactaatatacaacaattttatcccaacacaagtctaagcatgacaaatcacaatcacacacacacaagagttgcccatatttattcaacactatggataaactacatatgcattactctacttaatcttgggggggacccctaaatatagataatattatcttctcttatttatgttctctctctttcaactggaatcttttttttttttttttttttttttgagacagagtcttgctgcgtcaccctggctggagtgcagtggcccgatcttggttcactgcaacctctgccctcccgggttcaagcgaattctcctgtctctgcctccctagtagctgggattacaggtgctcgccaccacacccggctaatttttgtatttttagtagagatgaggttttgccatgttggccaggctggtcttgaactcctgacctcagatgatctgcctgccttggcctcccaaagtgctgggattacaggcatgagccaccacacctggcctagaatcttgtgttcactgatgtttccctaactcctaaaatagtctctggtatacagtagttgctcaataaatacttatgactatatgaggaaactaaggctcagtgtggttaccttgtccacagtcacattaataaacatgcaagattcaaatatagatgtgactccagaacttgtgttcttaaacactaacccataggtgattagacacaaacaaaatacataaatatggatagattaaaatgacaggccaggcatggtggctcatgcctgtaattccagcactttgggaggtcaaggcgggcggatcatgagatcaagagactgagaccatcctggtcaacatggtgaaacactgtctctcctaaaaatacaaaaattagctgggtgtggtggtgggcacctgtagtctcagctactcaggaggctgaggcaagagaattgcttgaaccctggagatggaggttgcagtgagtggagatcatgacactgcactccaggagagagactgtctcaaaaaaaaaaaaaaaaagacaaaatcagagttcatactttgtctcatgtggagcctgtgaaattagaaagcattaattcttagtttaattaatgttcccaaaggaaaagcttcctattaaacattccaagatattttaaattctcccatttacacactaaaactactgcgatcacttgacagaacgtttctccaaatgtttaacactcttgattcctgagagttatcctaaagcaacctggtttttttttttgagatggagtctcgctcttgttgcccaggcaggagcaggagtgcaatggcatgatctcggctcaccgcaacctctgcctcccgggttcaagtgattctcctgcctcagcctcttgagtagctgggattacaggcatgcgccaccacacccggctacttttgtatttttagtagagacggggtttctccatgttggccaggctggtcaggaactcccgacctcaggtgatccactcactttggtctctcaaagtgctgggattacagccgtgagccactgtgcccggccaagtcaacctgtttttaaagacataagcactgtgttgaacctatcctttagattaaagtatacacatcaatctgttccaaaagtggcctcaagctattcattggattttagtgtctttttttttttttttttttttttaaaaaaaagagatggtctcgctatgttacccatgctagactcaaacaatcctcccacctcaggctcctgagtagttgggactacaggcacacaccacctcacctggctggattttagtgtttgtctttctttttgctaatataccatcactgtacctatttatacaagcctatcatcaccctgcactacctcaacaatataccactggctgggaagcatgtagtttaactgctactaaaaaatacatttttaaggtgtcaaggggctgacatgcttctaaaagtaagtacatgaatttcccatggacttttgcgatttacaggccattttaacttacttcctaatcctaagagatgttctagatggtgtggggctatgggacaagtatcaatgatttgtcgtttttttatgacgaacttaaactaagttttaaggttcattaagtgtccacccagttcatgtgaactatatattaggctctgaaagggaatcctaaaaattcttaagttctttagcacacttaatacacagaatacaataatcatgattatatatcattttttagttaaacggtaataaaatctggacttgcaggtacaagaaagtaagttattactgaaagggttgaaggttgagcaaaagaaacaatatcatcaataattactcaatctccattcaaattagaaaatcagaattagataactaaaatacttccaaagccttttaaggcttgccattaaaattttagatgtgatacacaacatgacatcattttaaaacctgcaaattgtgagtagtgacagtttgtcaaagcataaacatttataataataaataacaagccatctccataaaatcttacttctgtataacaaaaccacatctttctacatttcatatctgctgtaaaggataatgttctacagtttttctaaacggacaaccaggcctgtcatctattaaaatttctaaaagactgcaaatatactgcacaagcactaaagaaaaatatacgacataatagttcaaagagtacaggctctagcagcaagctgcctggtttcaaattccagccccagtacatctctgggcccttgtctcatttacaaaacaaaagaaacaatagttcctatggttttatggggagtagatacattaacagatgaaaagtatttttggtagtacctggcaaatagtaaacactaaatattaactattattactgagtgcttccttttgcagaatgagaaattctttgattatgcaaatataatttcctccaataacttaaactttctaagtgttttcaaaaagcagggtgcagtggctcaatcctgtaatcccaacactttaggaggctgagatgggaggatcacttgaggccagaggttcaagaccagcctgggcaaaatcagaagaccctatctctaaaaaactaattttcttttttttaaaagcagggcagatacacagactggaaattataaacacagtgagacaaactcaataacaactgtattaactagccatgatatatcgcacttacttcactacattatagtagatacgacatggcccgcaaacatctatagtaatacgtcatgtcatttatacagaatttcatttatctttagcaaccagctgtaaattcttctgtgacaaagttaaggtaggaatttggtaaagtctcttttttagattaatgctgagttaagaaatcatgaaagctgaacagtaaaactactaatgaatttgtatcttgtgctttagtcctgcaggttttcatcacttcggctgccctgaaggttattaggtataggaggaataggtctctggaaaatgggggcatctcaaaggacataccttggtattaggacacaatggacaatttttgtctgtcaaggtaaatatgggtaaccagaatttggaggtaacagaaaaaaacacagggagagctgacaaggcaagttaaacaatgtcccctttaattttacatgaactttcaaatcttcattactttcattcctcccctgtacttaggaaaaccccactcatgattctaaacctagcttaacaattacctcctctaaatctttcacaataccatcaatttgattaatccatactctcaaagtacttggcctgcaattcattatccctactttatggaaggtattgtgaagctgtaagaacaagggtgttacagccaaacatcctgattcctgagcacctgtatatgtttttgaagctccagaggtgactcatctagctataccacataaaatgaaaagcacatttatggactagatttgtcaccaagacttttctttgaagtgccagatagtaaatattttcagctttcccggctacatataatctttgttgcatattcatttttttaaacaatcatttaaaaatggaaaaaccattctgagcttgagggctgtataaaaacaggctgtaggctggacttggcatacaggctacactgcctgctgattcctagattttgaattattggagctatatacagtaaaggcaggaaccagacaaagcaatcaacaggacaattcctccaattatcaagtttttaatagcttttagttttaagttctgataagcacaagtggatttatactcattaactttcttaaagctattgcttaaaatcaaattttgatctaaatcaggaattctagagagaactctgaagatagaagtacataaacaagaagctttagaaagaataggaagccatgcacggtggctcaaccccgtaatcccagcactttgggaggccaggagttcgagaccagcctggcaacatcgtgaaaccccgtctctacaaaaaattagtcaggcgtggtggcatgcacctgtggacccagctactagggtggctgtgccacgagaattgctgaacctgggaggtggaggtggcagtgagtatcgatcgtgccactgtaccccagcctgggcaacaaagcaagactctgtctcaaaaaagaagaaagaataatacggcagtctccctttatctatggtttctctttctgcatgtggtttcaactacctgttgtcaaccatagtctgaaaatattaaatggaaaattccagaagtaaacaactcataaatttaaaattgcatgctgttctgagtagtgtgatgaaatctcatgtcatcctgctcactcctgcccgggatgtgaatcatccctttgtccagcatatccacactgtagatgctcccagaaccttggcccattagtcactagcagccatcttggttatcctatcaactgttgcagtatcattgtgcttgtgcccaagtacccttatgtgacttaataatggccccaaagcccagaagtagtaatgttggcaattcaaacatgccaaagagaagccataaagtgggttcttttaagtgaaagctctttactcaaggaaagaaaaaaatcatatgttgaggtttctaagatctatagtaagaacaaatcttctatatgtgaaattgtgaagggaaaagaactttgtgctggctctgctgtcaaacctcaaactgcgaaagttatggccacagtgcaggataagtgcttagttatgatgaaaaaggcataatttgagggtgggaaacgtgaacagaaacatgtcccaaatgacagcaatcgggcttggcatgatctgcagtttcaggcatacactgggggtcttgaaatgtactccgttcaggtaagaggtgactactgtgaagagaaagcactaaaaaaggtttcttatatatttattataacctcaaatacaaaaatgaggagacatacctcacctctcatggagtcaagactaaatgagatgcaagatgtgaaagcacatggtatatacactttgaatagtttcttccttgcagttgctaataaatgcttactgagtggtacttcctggaagaccagaggacgtgtctcattttttttttctcccacttagtaaaatgctcaggtatagaataagataatcattttgaatgagtgagaataatgaacctaccaccaaacatattagtcacacaacaatgcccagcttcatgggttctctatagcatgggttcaacctacattaccttagtttcatctctcattgctctacttctgggcacacaactctaaccacgagttagtcaaaggcaccctgccttccctgttccttatctttgttcacacgtacaactttcctctccattcccaaggtcaacttgaattggtagtacttccacttctacccaaagcctttcctcaagaggcatgaagattttccttctttagaaatcctataatgctaagtatcaaatggcatttgcttggaaaatatcttctgtaaccctaacagcatttagcatactcccaattcactgacttgagcaatcaaaaagtggttacctcagaaatcaaaagccagtgggcaacagagcaagaacctctctctacaaaaaatttaaaaattgctagccacttggtggcaggatcacttgaaccctggagttcaaggctgcagtgagccatgatctcaccactgtactccagcctgggcaacagagtaagacgtacgactctgtctcaaaaataagtgaagtactgacccccattttaagtctctttcaaaatatcttgaaaactttagtgattataataaaaattatatggcattgaggaaataatgttgaaaatactcacaatggttaacatcttgttatttaacctaagtggagacaagactgagtcttttaacaaaatggggggaaaattaggttaagtttttttaaaaaaagaataaagaaaaagctgatttccaaattgtcatgagatttaaagattcgagtttgctacttctctatatgctgagtggttcaatcaggaccatcaactatttcagatgttctaaaggggaacaaataaaaatgaacagctgccattaatgtcagatagtacaatgtactataacctaaatttttaaaggatcagtaatacagaagtttcaaaaacgtgaaggggattctccctgtctctgataaccatgaaggtacagaatcagaggaatgacataagcactttttgaaggaaggcaaaaaaaatcttgggaaagcaaggcttacctatgatttataggcagcagggctcttgaaggagggtctccaaaaaagacgcctgtcacagagccagaattctgtcctcacagcagaaaggttgtactgggtgaacagatgaacaaaataaaaattagcttaaaatacactattctttcaacaatttggctgagaaaactcagaatgccaagaggaaagaatgtgcaagtctagttatatttcacagaagattatgaaagcaagtttaaatgggttttagtatggtgattattcaattctgccttccaacgaaaggtttaaatggtttatacagattttgcaattcctctgatcaacgtgtgagaggaagagatagtttagttttctaaaacacaatgtgaaaggactaacaaaactttcacattcaccttaccactaccagataatcccttgaatggtccaaatagatagtttaccaaaaattataatggagtttctctgacttggcaaacattgtaagatggctcactgaaccacccacttttgatctgccttcctcttataaaggtaggaaagctgacacctagatctcagagcttctcttgcagttaggtgggcagacaacaaagtgctggctgatgccatgtatatggagatctctggtaaaaggcatcccattcagggaaaaaagccaaaacatcactagaagaaaaccttttgctcttccttatctggaacatgaatacaatgtctaaaggtaaaacaaccaccttgtgatcatgaagttaattgccatatactaaagatgagagatcaggaaaggacagtacccacatcctcaattcctttcttgaactgctgtactggccctagaatgtccctgtctgtgggcttcttgtcatgaaagaaaaataaactcctgtttcgaacattattagtaaggctgacaattatttcagcagaaaacattcctgataacatatggcaacattcagataaattctaaatactcgtaaaactccacagtttgtttcatactttcgagatacgtatgcgctataaaaacactagaaaataaaaattgaagacagaggtattaggataagatgaaaaagaaataaaatatgcttttaaagagtctaaaagactgttagaattgttttctccaatatgtactatttcccccttttttctgtactctgcagtaatttctctatgcctcaaggttaacacctgtgaatagcatgaccaaatgtggtttatgaccaaatgtggtttaacctcaacggctcattgatacggtttggctctgtgtccccacccaaatctcaccttgaattgtaataatccccacgttgtgggagggacccagtgggaggtaactgaatcacgagggtgggtttttctcatgctgttctcatgacagtgaaacagtctcaccagatctgatggttttataaaagggagttgccctatacataccctcttgcttgctgccgcgtaagatgggtctttgctcctcattcgccttccaccatgattgtgaggccaccccagccatgtggaactgtgagtcaactaaactcctttaaaattactcagtcttgggtatgtctttattaacagcgtgagaaaggactaatacactcattttagcaatcctgccctgaagaagctaatcccacataggaaccagctgattttcataatcaatttagagaaaataacctgtttattttcctatttctcatcaaaagaaaaaaagaaaatcatccaccacttccttcccaattgctctccttttactgttctaaaaagccaatgtccaagagacaagctaataaggaaattcaaaatggctcttttataaagggatttctttctgaagttactctcacaaagaatactcttttatttaattacaaggaaaagaattgcaaaactattgtgactcactcactgcatatcataaaaacagaggtagaggtacaggtacagaaaacctcaaacaagtgctttagcaattatcagctaatatgctaaatctgacattttcttttaaattacttttgtaaaactgtcatttcaattaactatatggatttcagtgatttcatcttaacactgaatttacttataaacaccttagtcttctacacatctaaagttaaacatgaaactaggaggaaaataaatacaatttaacctcatataattagccaaaggagaactataaacttactcggcttgcataagatttcttacttcaacaatgaatagagtatatttgactatacagttcaaaatcctcattttacagaggaaactgaacaaagtaaaatcaatctacccaaattcacagttatttactccaagaaaaacagaacaagaagctgatcttaatgaataagagtcttttatttatcaaagaaaaatctgtgtcagaaaataaacagaatattaactcactaatttcctatcataaagaaatctacaggcaatccaaaacttctgtgactaacttgcaacttttctttatggcttcttagaaaagaggtccttccatagtaatgaccaaaaatagctccatttatgaagttcctaacatggctgacatttagaactgagtcttcataaaatggaataaggaaaaacaaagttgccacagatacactgttcctcctgccagaacttacctttcaaaggcctttcacagaaactgaatcagcaataaaaagctgaagacagtgctaaatttaaagcaacaatgcttgttggagagacatttatcagggaaaaaaaagggggggaaacaatttctcagtccaaattttattttacattttataaaatctgtcaagtactagcaaaggtagcaaaaaaatccctctaataaaatatgatatagcttttatattgtgtgatttcatacacctaatgtctgaaagcatttttacattttcttctcccatggattttcatcaattgacctgggtttctagtcacagaccctagattagggcactacagaaggtaaaggtttgatttatagtgagatggttccacttgtgattattatcctggaaccaatatgggtataaatcaggtatcatctgcatacaccaagttcaactacctctacagaactatgggacaacaatttagaaagcgaattttaaaagtgagtataaaatgctctcgttttttttttttgagacggagtttcgctcgttgctcaggctggagaacaatggtgcgatctcagctcactgcaacctctgcctccccggttcaagcaattctcctgcctcagccttcccgagtagctgggattatcggcatgcaccaccacgcccagctaattttgtatttttagtagaggcagggtttcaccatgttggtgaggctggtctcgaactcctgacctcaggtgatccacccacctcggcctcccaaagtgctgggattacaggcatgggtcaccatgcccggcctgccctcactttttaacctgcacctagtaatgacaagaagattcgatttagaagttttacttgtcataaaacatcattttaattctaataataatagcaactaatacttacatactatatgcaccaggcaccgctctaagtattttaaataaaatcctttaatatgaccctatgaggctaatactattatcactccccattttacagatgggaaactgaggtatagtttaaataacttgcttatactaatacagtaataatccaatatagaggtcagatttgaactcagtttccagagcccatgctaacgtctctatgaaaaaattagacatttatattctatgataatgtttcgtgctttaactctgcccataaagagagtttaggaatctgaatggcacacagtagacaccaaatatttcctgaatgaagatactatcagtttaaaaatttccactgttatatatatacatacaaacaaacatgttttcctcccggatatccaatccataaagaccttaatgctcagattacttattttcctttgtgccaaatatatattaagatatttatgaagcacctactagattcgtaaccctctttcttaaatgatgaagcatttcatacttagctttatagaagtctttataaaatttgacgctaaaacaagcatgaattgtaaataactcaagacaaacatacatactaaacacccacacatatcatataataccagagttcactatatctttattccttctaattcagtggagatgattccctccttgtctcgccccagggacatttgacaatgtctgaagaacatttttggttgtcacaaggggagcttgggaatatcacccacaattaagaatcatctggtccaaaatgtcaagttgacattatccaagtccctaaataaggcaaggttgattacccaatctatagagcaagttccaacctttgaacgaaaacatcaaagttaaaatacagtctaccaaaacatcattaacaataatagaaacccatctcctgtacccactctccatgatctacctgactgaagaggttaaccctcttatttaactgcttcagcagttctcttcttcatgaagtttcactttggaaactaagagtctcaacttttacaaatactcccaaataaaagaaaatgacaggtaatacaaaatttatccactcattatataaacttcaaatgctgtttattctcactacatagtcccctaaaggttgagggggggaaaaaggcccttaagtcccttgctttttccgtaaaataaaatgatccaagtcaattataaagtatcaatatattacgaaaaaaatcctcgaagaatctgctcctatgtggtcctattcaggatatgcaccacttccgcttcccttcccatttatctactctagtcttcaacgtccagctcaaggcccacttcaaatccagtccacaccaacctcactcttttctgactcatactctgacatggtaatgaaactaaaagctctttaaggaaaagaaatgggttcatacttaatcatttctgcatcttcagaattaaaaacaaccaataaggaagtgttttctggctgtaccttatagcagaaatatttaactctccccatggaaagaaatgatttaaaaatatagtaaaatattttacctcctcttcactttctttatcttcatcatctgaagactcttccttgtttttcttttcatcttcatcactactagattcatctgacagaatttcaggacatttggttcgcttagccttccttgccattccagaactgttccgttcctttttactgcctttgctacaagtttttttagatttcggcaatggctgcataaaaatttataaagataacaccaatgaggtataatatttcaatcaattctcttcttgaaaacttatcaactcaatttcttattcctctctcaagaaattgtatttacaagcccagcagctttgcagagaataatctttaaccgtgtcaggttaacctaaaactgtgttactaataccatttgtgttctaaacacctagcaagacccttctcaattgtagagaaatatgtattctaggttctgacatgggactagaagctcaagacacattatgttaagctccaacggctgttaatactttgtcatgataatattttaagttagatttgtaatttatttcatccctacaagcattaaaactgtcactgccaacccagcactttgggacgccgaggcgggcagatcatgaggtcaggagatcgagaccatcctggctaacacggtgaaaccccgtctctactaaaaatacaaaaaattagccgggcgtggtggcgggcgcctgtagccccagctactcgggaggctgaggcaggagaaaggcgtgaacccaggaggcagagtttgcagtgagccgagatcgcgccactgcagtccagcctgggcaacagtgtgagactccgtctcaaaaaaacacaaaaagcaaaaaacaaaaaactgtcactgccaaagaagctccttgctttagaaggcccaacactccaatcgaaggaatgggagaaaaaccttttttttttttttttttttttttttttgagacagagtctcattctgttgtgcagtagctgggattacaagtatgcaccatcacgcccagctaatttttgtatttttagtagagacagtgtttcaccatgttggccaggctggtctcaaactcctgacctcaagtgatccacccaccctggcctcccaaagtcctgggatacaggcatgagccaccacgcctggcccataaaaaaaatgtataactttattaccaattatacatcctgaatttatgaatgaactatacggtttatattcattacttctggcctctactttcaacaatgtcaggctcatattatcactgatgcctataagtatacaataaatgataagtatgttaattatgaaactaagaatatgctgctattattctgataatcaattaaaccatgtatattaaaagcagagatcacctgatgaaaatgagttgattacagtaaacaataaatttaatttttaagtgctttctcaaggaagttttgctaaattctaaaattgaaaaccataaaattacctaacatcaagaatgttaaaatgcgcattacagaattaatatttatttctgggattgagcatcttttatattcttttatttctacctttgttactttattttctgcaataagcagaaacattaaggtaaaattccataacataaccttaaggtatccaattgtgtaaatgtttgtgataactttaggcaatatttttcttgcagagactagaacgacaggtcctttacctcccaggaacctccagtctaggggtcactgtcacctacacaaaaattaagaaaaagtggctgctttgtataatatggtactcttgagctctctgcaaagaaaccacaggataacctagattgctccaacaacgtacccttctaaaggcacactaggaaacagcaaaattaggtcactccaggaacttgaagttggtggatcaaagacatttctcagagaagattctctataagaaatcgtgaatgcatacacatatccttgctatgtgagatactaccattaacaactattatcagaaccttaatccatgtggataaattctttgatagcaccgtttggagaaaaggtaactctcactgtccaagctcttactacttgttacatgatctccaggtctcaaatgtattagaaaaacataatatccctcacaatctcagctcagaaaccagacacaggtagcaaggatgtaatctgtatatcgaattattagtatgaggactgaaacaggttctggataaatctatccaggaaagtgaaaagatgttaagttattcaagcagccaataaaaaaaaaaatgcaattcccaaaagtaaacgaggagttttaaaaccaaaatccaaaaagtagtaatatacaaatgccttagagttttcctatactactccaaaaatagttaaatctattaatcaaaatccagtgtcaacagcattatctctttttggaaacaaaatctgattaacaaataaaataaggtaaagtacaatagaaggataggaaagcaatcaatgattaatgttgtgttgattaaaccattgagaaattgttaaagaggagaaaaaggaaacttcttgtagcatagaaaatagctctaggccagacatagtggctcatgcctgtaatcccaacactttgggaggccaaggtgagaggatcacatgagctcaggagtttgtgaccatcttggacaatatagtgagcccttgtctctaagaaaatgtaaaatttagccacacatggtagcatacacctatagtcccagttacttgggtggctgaggtgagaggatcacctgagcccaggaggtcaaggttgcattgagccatgattgtaccacaacactccagtctaggcaacagagtaaaacgctgtctccaaaaaaaaaaaaaaaaaaaaaaaaaagaaaatagcctgagctcgatactatcagattaaggagtaatcatcacagaatcacatatgaaaaactgacataagagttaagattctatatgacaagaaaaaacagattctcacagtgtggttcaaggactttggggtttcctgagacctttttcggagtctccgaggtagaaactattttcataataatagcaacactatttatctgctcttttcactgtgttgacatttgtactaattgcaaaagcaaaggaaagcaaaggtgggtaaaattgatggcaccttagtactaatcaaggaagcaacatatattagtcactgtattcctcacaaccacacaccagcagaaacaaacaaggcaaatggtttcacttaataatgtccttgataaaacaataaatactgtgttaactctcaagtacatgtctttctaatatctgtgacaaaatggaagatatacataaatatggctacaactgaagttcaatggttttctgaaggaaaagcatttgtgtatctgagttgtgagctaaacacgctccaagctcctttttcatagaaccccacattttttttttttttttgagacagtctcgctctgtcgcccaggctggagtgcagcagcacgatctcggcttactgcaagcttcacctcccagagaacaccactttttaaaagaacaaatatggctaactcagacttaggtatttgatagagatgttttcaaacatgaacaaggtgagcttgtcacttcaaggaaaactgagagcatttatcgccaatgataaacgttatgatttcaagtgggaactagaattctggaaaattcacatctactactgtgaacttgatagtttaccaaggcctaagtaatttttctgatgagatgatatttatattaatgagcatgatttaatgacagtgttcaataaaacgtcaacatttggaagacataattcagggaaccaatatttacaagcggtaaatgcatgttacaaaactatacatacaagacccaagttaattaacctggtttcagacctacattaaacattacaactaatctttaggaaactacaacttatgtagagttttggtattgtatggtatcaaaaagagaatatacacaattatctaaaaagactttaaaaatattctttttatgtgaggctcggttttcttcatatacttattattttgagagaggatctcattctgtcacctaggatggaatgcagtggcatgaaaatagctcactgcagcactgacctcctgagttcaggcttccacctcagcctcccaagtggctgggattacacgagcgtgcctcagcgcctggctaatttcttcttgagacagtctcactctgtcacccaggctggtcttgaactcctgagctcaagtgatccacctgcctcggcctcccaaagggcagggattacaggcataagctactgcatcaggcccttcatagattttaaacaaaacaatacattgcaaaagactgaatgcggccaggcacggtagctcacgcctgtaatcccagcactctgggaggccgaggcggtcagatcacctgaggtcaggagttcgagaccagcctggccaacatggcaaaaccccgtctctattaaaaagacaaaaattagccaggtatggtggcacacgcctataatcccagctactgtagagactgaggcagaagaattgcttgaacctgggagacagtggttgcagtgagcagagattgtgccactgcactctagcctgggcaacagagtgagaatctgtctcaaaacaacagtaacaacaacagtaacaacaacaacaacacaaaaagactgaatgcagaagcaaatggtaatcaagctgttttctcttaagccagacattaaacagatgtacaaaaacataaaatgccactctttcattcttttgaaaagttatttttcctagaaaatattatttttaacattttaaaataaaaatttttcagttctaatgtcaaatacagtgaagatcaaaataactcatattaaaaaaagctcttggggtcctcactaattttttaagagggcaacagtatcctgaaaccaataaattggaaaaccactgagaaaaagataaatataaaaatatctgtcataacaacctagtaaattgcttctgaggaaatagtgatcaccttgcctcacactaaatccttaaaaagtacaagtatagctatagtaaaagttagaaaataagaagtattttgtctttaaacaagccaatttaaaacaccaaaaatcatcataccccttgcgtttgtagttgtataacaaaagtttacactttaactgctgtttatctgtcctcgtgcagctaatggtaataaggaccaagggcggacgaaaacgaagtcctagagctattttctggttttgattaatgccatctcccatcagagatggcattcccctgaactcctaggcctgctagatctctcacacttcctttcctgtcaagatggggaagaatataaaaacatttgctgacagacctaaatcacactaaaaaggcaaggtcatgtaacacttcaacagacattttaagtcacctatgtcattcgttaccattaaataattagggcaaacctactagcttttaggaagagtgagaaaactgtaaggccattttacttccctgtctggctcctgggctctgctgcagattctggaaacccaatataggaaacttgtaagagttagcttttaaatgtcactttttaatactttattccaggatctaggaaaacatccagttctaatatactccctattttgtcttcacttgattacaggttgcaccccttccctccagccttgcacctcatcctcagcccaacctcttcctattcttccagtgtcttctagatacctaaccctgactactagtactttctgtcccttctgacattaattcactattcttaaccttatatcccttgtatctgattttccgaagcaacatacccctatggcatctatattatttctatcaggaaattactgcagatacgtcaacagaaggtatagtctttgaatgtagatatgaacgaatactgacagcaatgctgttattaatcaatttttgtttcatataaagaggctatgaataactgatttatgaaaaaaataaaaattgatcctcactttgccagaaggctttggatgcattaagaaattcaagatcctcttcactagttcactatttacacctgatctctccaaatcaagaacctcacagatgctctttaacatggcatttctaaatctgaaacagaaaatggaagaaaccaaggtgttaatataggaaagcttacatatgttctccacaatataaagggaaagccaaccaaattggctcagttacatacatttaaaaaagtggccaatgcttctatgaatcttttttctttttttttttttgagacagtttcgctcttgttgcccaggctggagtgcaatggcccaatcttggctcaccgcaacctccacctcccaggttcaagcgattctcctgcctcagcctcccaagtagctgggattacaggcatgcgccaccacagccggctaattttgtatctttagtggagacggggtttctccatgttggtcaggctggtctcaaactcctgacctcaggtgatacgcccgcctcagcctcccaaagtgctgggattacaggtgtgagccactgtgcctggcccgaatgtgatttaacattaaaaaataaacttaaagcatattgatcaaaatacagtatttataaaaataacttactttttcaacatttcttccttctttttatattggacacttcctttttcaaatggaaagccactgaactgacccacattcttctttaatgaggacacctgaaaatgttccttattattaatggtatttattacccagtaatgtacacaagaataaattcaaagccaattcaaagtcaacatctttattttcatacctgtctgtaagttacaatactggctgaacagtcaaccaattcaatatgggttcaatattcaacatttcttattcaaaactgaaaaatgtatttgtcattaacatattaacattataaaaatcctacaaacttaagtctctgaaaagaacaatttgaacaaattttcactggggagtttttaccacaaccaaaagttacctgacagtaccaggggatgtggaaagttactatttaaaaatatatccttttcataagtaataaagttactagtaattcttcttttccaaatcaagaaggactttattctttcaaagtaaagaatagcgagtaccacaaaaagctaataccgttcactagttatgggacttgtgtaaattaaattggtttaaggattaaatgagattaacagactcactgaaaataaattatgtcatgcaccagacattctattctacttcagacattctaacacccaactttactttgcccacgtacaacctaaagcagttccctcgattatataatatactaagtcatatgtacagtataataacaatcctttagcaaagaactatcatccaatttatcaggtatttgctaaaaatgagatacaattacaccaaattcactttgtatgagatttgtatgagatacaaatgattttgcctcttatttgtatgagatacaaatgagatcatatgtatgatctcatacaaatcataccgacattcacttattctgaatgtcgagaaaatccaaaaacatgaatttctttcaatacatttaaaggtcactaaaacctttcatcacaatttggatttcgtaatttgaaatttcagtttggaataaaaactactacaggagaaagagccctagagctgggcatactggctcacacctgtaatcccaacactttgggaggccaaggtgggaggaccacttgagctcaggagttcaagaccagcctgggcacatggcaaaaccctgcctctacaaaaagtaaaacaattagccagacacagtatggtggcatgcacctgtggtcccagctacttgggaggcttaagcgggaggaacacttgagcccaggaggttgaggctgcagtgagccatgtattgcacactgtactccagcctgggtgacaaagtgagaccgtgtcttaaaagaaagaaaaaaaaaagaaaaagaaaaagaaaaaagaagacagagccctggatattataatccaagtgctaatatccagctgtgtttcctgtgataaatcatttaataagtatatacctcagtctgctcagtcataaagtgtggaaattgaactagtggatcactaacatttacagaaattgattccattgtgaagtaatatacaagtaggtttaaagtgtaaaaaggtcttacagtgcctggcctgttgtaaagcagtttgtgtagatttctaagttcatcggttttcttcttacttagaaaaaaatgtatcctctcaatttcacaaagtttctgcccctttcctggggaaaaaaaaaaatcacaattaaatacctatggcttactaatacatttacaaagttaatttaatgagaattattttcacagcataatttacatgtaactctgctcttacagagcaaattaaataaaattataccaaaagtataaaacactaccttgctgatactaagctacaaaccatcattttcacaaatttaggcactttcaccacaaaatgaaaggaagctagaataaacttaccttgtgcaattgtaaatggctctctctgtaaggaagagacttgcattgtcaacctctctacttttttcttttccctcttgccttccacgatgagactcttttctagaaattaatttagtatttcttaattaacaaaaagcttaaacattgtattaactttattagatacacatgtagaacaaagtccccaaaacctaatactttattcttcttctgagcatggttttggaaagcaaatgacataaaagaggaaaacacttgattaattaatagagcaccatgaaaattttttcagagtaacattttactcacctggcactcacagggactcagttaaaaaaaaaaattagaaagcaaactaatttttatccaactaaaattattgccattacagtccagtcacttcgtttgtgaaaaaaatctagctctgtttaatctttggacataattctatttaataattgagattcagtttgctgtacttcaggaataatcaaatttagactgggagattaagaacttcaaaagatatatagagaacaataacaatttagtaaactgacaaaagaaacacaaataaagacttccaggcagaacagcctgaagtacgtggataggataaaactctccaagtttacatttaatgcaatcaactgggagagcattactttgtagtttatgaataacattcctaatgatgaccataagtcactcaaagttaaattgtttagtcacaaaaatctacggtgaggcgcggtggctcatgcctgtaatcccagcactttgggaggctgaggcgggcggataacgaggtcaggagatcaagaccatcccggctaactcggtcaggagatcgagaccatcctggctaactcagtcaggagatcaagaccatcctggctaacgtggtgaaaccccatctctactaaaaaatacaaaaaattagccaggtgtggtggctggtgcctgtagtcccagctacttgggaggctgaggcaggagaaaggcatgaacccaggaggcggagcttgcagtgagccgagatcgcaccactgcacctcagcctgggcgacacagcaagactccgtctcaaaaaaaaaaaaaaaaaaaaaaaaaaaaaaaaaaaaaaatctagaaaacaggtagcatatacttcaaaattcaaaacattaagctccatttatctaaaataaaatcattttttgaatgaaataaagtcagataaaagaatactatatactgctcgaggttctgccatttatttaatgcctgtgttgtgcagctgcactcaatactaagaggggataaatggatgataaaaactgcgtatcttttgaaaaagatgctactaaagaaatgagacataaatatacgccaatataaaagataacaaaacatcttaagaaagatacacaaataaattgctgtgcactgaggaggaattgattattttgggactagagaaaaaggaacaaagcacgtgtgctggcttttaaagacagcttagatttagtaatgtaaggattcgcacagaaagaatacttcaggagaaagggctatcaacaggtatattctggccatgttgtacagaatgaagaccaaacacactaaaacaacccctactatcactcaacttcatcaacttagtgatttaaactatttgcttgtctctgattactaactacaagctaatgacttcccagtcaatctccaagccacaactttcatctgagattcatattaactaatattgcctcagtatctgtgagggattggttccaggacgcccctcagatgccaaaatccatggatgctcaagtcccttattttttaaaaaaatggtgtagtagttacatgtaacctatgaccatcttcccatatactttatatcatctgtagattactcataatgactaatacaacttaactgatatgtaaatagttgttatactgtattgtttaggaataataaaaaaatctgtacatgttcagtacagatgcaaccatccatttttaccaatttgtggttgattgaatccacagatgaggaacccacagatatggagagccaacagtatatgcctgtctgtcatctggacagctacaattcatgtcctacaggcacctaaactcaaaatattcaaaagaaaaatcataatcatctccaaacttgctcactttgtgaatttttttcaaaaaacattaataccatccacccacctgccaaagacagaaacctaagagtcatcttttactagtcatttctctcacttcccttttccccaaaatcactgccaattttggctaatctgacccctttcttaggacagacttcagaggatatatgagaaagcctgggtgcctgggcagaagcctcctgcaggggtggaactctcacagaaaactgctactcagggccaggcgtggtggctcattcctgtaatccaggccctttgggaggcagagacgggcaggtcacttgagctaaggagtctgagaccagcctgggcaacatggtaaaaccctgcctctacaaaaaatacagaaagtacccgggcatggtggcgcatgcctgtggttcctgaggtgagaggattgcttgagcctgggaggcagagtttgcagtgagctgagatcatgttactgcactccagcctgggtgacaagtgagaccttgtctccaaaaaaaaaaaaaaaaaagaaagaaaacctctactagggcagtgtggagtggaaaggggaaatggggggtggacccctagattcaccaccaaggctctattggctagtggagctgtgggaagggggctgccacctccaaactccagcatggtagagccacaagcagcttgcatcctgagctgcccaaagccttgggacccctcaccccttgcaccagcgtgctctggatgccagacatgcagtaaaaggagataattttggagctttaagatttaaagactgccctgctaggattcagacttgtaggccgggcgcagtggcttacgtctgtaatcctaaaactctgggaggctgagacgggcggatcacctgaggtcgggagtttgagaccagcctgaccaacatggagaaaccttgtctctattaaaaatacaaaatcagccagctgtggtggcatatgcctgtaatcccagctactcgagaggctgaggcagtagaatcccttgaaccaggaggcagaggttgcggttagccgaggtcaggccactgcactccagcctgggcaacgagagcgaaactccgtttcaaaaaacaaacaaacaaacaaacacagaaaaacaaaaaccaaacaaaaaccaaaccagactgtgtggggcctattgcacctttcttttggcctttctcccttttggaatgggaattttacccaatgtctgtaccatcactgtatcttgggagtaaataacttgtttttgatctcacaggctcataggtggaagaaactcatcttcagatgaaactctggacttacagatttgggacttctgtgttaatgctgaaacaagaccggactttgggggactactgcgaaggcacaactgaatcttgaaatgtgagaaacatatgagagttgggggaccgggggtgcaatgatatgctttggatgtttgccccctccaaatttcgtgttgaaaagtgatttgcaatgctggaggtgaggcctggtaaggtgattaaatcatgggggcagatccctcatgaacggcttagcatggtaatccgtggtggtgagtgagttctctcaagatttgtttaaaagagcatggcacctccctctacaacttgctcccactcccaaatgaaatgcctgctccccctttgtcttctgccatgattggaagtttcctgaggctttcaccagaagcaaatactggcgccatgcttcttgtactgtctgcagaaccacgaatcaataaaacctattttctttataaactaccctgcctcaagtgtttctttatagtaacgcaaaaaaaaaaaaaagcctaatacagaaagtatttcactgtctggcttccatgatgcctcagttctaaagttaaatattcagggttaagtaaaataaaaactttcacaattctacttgtcccacaaacacctcaaattagtaaaaagaataataaatcacagctacaataaaactattaggggataaaatttctacaacatcatgtttttaaaaataatttgtctagaacaaaacatgggattctttcaactaccaactcttccccaagcattactgtgttggccacttacagtatatttacatgacttctctaattttttcctgacatgaagaaaattcaccatttctttggcatctcaaccctgcccccaccagaagaccaaaatacaaacaaaaaattggagaaaaagtgcagagcctctttggctagcagcgagatagtgcagccaattttgttgttgtattaaaaataattttaaaataacatgttgttaagcaatagtttatgtgaaaacttatatttaaaaagccatgctttacttaaatatgcccttcttagggcacataccactttaaacaaacaaaaggcacaccttgtaatcttaacccagattgtgaccacaggctggttgaggcttaaaaaaaatccgggtttaggaagagcgcttcaacctcttcccaagtgtggctgagtcgtaaacatatacgaaataaccgcagactaagctaatatcaaagaatgctaagagatgcgactcggatttttaaatgtttggaaacatgtcaagaagcgggtacacctgaaacagacactgcatgcatcctggataaactgccgcagcacactcctctattcagtcaagtttccgtttcacacctccagtcaaatcagggctcatatcgccctcccttaaaacagacacaggttcgaaaccgagacagtgctgggctcacatttaactttctttcagagttcactttcttcatttttaactactttctcaagtagcaacagctttcaccgctgtttgccagggagggaaactttttggtaaatgtaaaaatattcgaaagtattcaaatacttccgggtctagccttataacttcagtcttaacgggctgcaccaagaccttacaataacttcaaaaggcaaaagatgtgtaatgaaaaggacaaaattagaacatccacttagcaacttcaaaggtgcacacacacaggtaaaaaaaaaaatcaaatccaagacctacaaacttcccgtcaaatgatgaaatgttaacgaacgtttagagcggacgagaagtcggctgcactccaatacatctctaccacgctaacaaatactttaaaaaccggaatacacaaagtcaattctacgccatcgctcaaaacaaaagcagataaattgtgcacacattctcgctgaaaatcactccgacttcacgcctctaaacaccaaaagagcaagaaaactgtttcctgggtgaaaaatacaaaaaaacttcggtctgaaaaattcatcagttgggatgcgactccccccacctttttcctcctcctcctcctcctcgtcgtcctcgtcctcttcctcctcgctctcctctctgggaccgggcatttcgggttctttctcggacgcgggctgggtgggggttccctccccctccgcagcaggggccgaggcggacatgctgtgaacctgcatgcgggaagaaagccggacgtctcggtcctcctactcccgcaggcaggaccgggcggccaccctgaatgatgctacccttcccgcgggacacctgccctgaaagttgcctcctcccatagccgggaccgcagcgctcagtccccaggggcggcttccctcccgctccgccgccgccgtccagggattcccgaggcgggaaaccgcgcccgctgccccgcgtgcgcgcgcgcccgcccggcctgcgctgttcccggcccggcccgagctgccggccctccacgtcccctcccccgccccaggccgccgtccaaatggccgcgtccctcccccgtcggccgcggcaggggcgaccgggcctccggcgtcccgaagcagcccttaccgcggatttcggccgccgcgggcctggcacgcgagggcacgaggaggttctgggaggcggcggcggccgacgccgaggagaaggcgcgcgggccgctgtctggcgtgacgctcgcgccgcgcgctcggctccccagaatcaacaagattttcaaaatggcggttcgggaaggagagcgggaatgcggcgaccaatcagggccgcgagctgggagttggcgggcgcggggcgggggaggc

SEQ ID NO: 605 - DNA, 10332 bp, Homo sapiens
tgataattgaaaaactggcagaagggcttgacattcaactcaaatctccagtgagtatcaactgctgggaggctctggctcgccttgtttggggaggatgtgaagttctgggcatgcggctcacgcaggagaatggggctggctttggtgtttagccagggtctacaagtacttttgtggctcattcgtagcctgtgtagcattatccatgtcagtgaggcagctgctgctgcttggaaaccgtagtggccccagtgcatttctattaagaagaaggtattcaaattgcttcgcaactttcctaacccagtgcagttattttcactttaaaattttcccttcaaatctttgtctcagtgcatttgtattgtgtgttattgtaatcatgggggtgattacttaactgtatttcccttcacaccatattataactatcttctatattccgacacaatgtttattttgtatattctgacacagtataaattctaactccctcagttcagctataacaattgtttagatctctgaatgccaggaaaagattccccttagccttggagatgtaaattcatgtaatatgagaatcggaaaggatcctggatcacatggttccatccctcactttttttcataattgctttttgagcaggtgcagtgtattgattattctggagatgaagtgcaggttaccactacagatggcacagggtattctgcacaaaaggtaagagctagggcagtacaagggtgggtagaaacctttgctgccaggggcttggagggaaggacaaatctttcctatcaaggagtttgcctttgggaatctgcctggacccttgttggatttctggtaagttatgtatctccacttaattgtatgtagatatgcaaagctgatttcattgctctaacactgtatagactcatggcagatggaattctgaattgtgttccttgaggtgagttctagggcacattagtcctgagagttgaacaagaaaaaaaattccttggccaaataagttaggcaaggccaagtaagtttgggaagtattgtataagatactctacttttaggattaaataggagttgtatagggttaaatagaagtatgtgtatgtatatatatatatatatatatatatatatatatatatatatatatttttttttttttttttttttttttttttttttttgagatggagtctcgtgctgtcacccaggctggagtgcagtggtgcaaactcggctcactgcaagctccgcctcccgggttcacgccattctcctgcctcaacctcccaagtagctgggactacaggcacccgccatcacgcctggctaattttttttttttttgtattttttagtagagatggggtttcaccctgttagccaggatggtctcgatctcctgacctcatgatcctcccgcctcggcctcccaaagtgctggggttacaggcgtgagccactgtgctccgcccaaatagaagtatattaaaggctctgagaagtcctgcattaaagaaatctattttacttttattctgtgctctccacatttttttaaaccacggaatccttcttcagatcaggaaagttctgttttcatcttgaaatcttgaaactatcagaagtactttcatatggcttaaattttttgtaaacagctttatagtaggtgaacagtacaaggtactgctgaatcaaatacctgaaatcacactgagatttatagtattggagaataaaggtgcctccttggggtagaggggatttagtaaaccttgaaaatttaagtttagttatatcttaagtgactatgaaaaaatataattgatgaactatcactagttcctagactagctatgcttcctacatttcaggtatctaaaacttatttcatagtccttgattttcatacagaagtaaaggactgcatgtcacatgggaaagacaggtctagggaatgagttagtcgaggcaggggatcctaacattattcctgccattaaccaactcggagatcttgggcagcaatccccgggctgcacgtcggaaccacctgggaggcgcttacaaagaaaggctggaaagccccaccctgatgcgttcttgttgaattggcctcgcttttttgtttgtttttttcagagacagggtctcagtctgtcgcccaggctggagtgcagtggcacagtcatagctcactgtagcctcgagcaactgggttcaagggatcctctcacctgagcctccctcgagtagctgggattacaggcatgcaccaccatgcccggctagtcatgtttttaaagcttctcaagtgattccagtgtgcagccgtggttgagaaccttgtctgcagtgaccttttctgtaagctcttaataggttttgcctggtggtaaacagtgtttaaaaatactaccttttaaaattgcaagtcacccgacagttcagcctctgctgttctgtagctccacttcttggtgtccaggacagcaagctggttataactcccctgctttgttactctctgcctgaccctggccagtacttgtgcgtttctgtgtttgtattccagccttctggagaaattagggcacagcttcaggctgcactttgaaatgtttaaaacaaatatttttattgtagctagcacgcaccacagtttgcattggaagtttccccaaacttgtaagagaataattttcaacccaacgtgatagaccgatgaacctccagcagactaactcagtctaggctgcttccattgacatctcgcttttattacttactaggatgtgtttatatcatttgcctatttgtttacccaaggcttttctttcttttttttctctttcttttctttttttttttttgttttacagggtcttattctgttgcccaagctggagtgcagtggtgcagcttgtagctcacagcagcctcgaactcctgggcttgagcagtgctcccacctcagcctcctgtgtaactgggaccacaagcacatgccaccacactcagctaattaaaaattttttttttgtagagacagtgtttccctatgttgtccaggctggtcttgaactcgtggtcttaagcaatcctcttgcctcagcctcccaaaatgctgggattataggtgtgagccactgcacctgggctactcaagttcttatgcttttcagtgctattttgtcattaagaaaacatctagatttgtgggcgtgggtggctcatgcctgtaatcacagcacttcgggaggctgaggcgagaagatggcttgaggccaggagtttgagaccagcctgggcaacatggtgagaccctgtctctaccaaacataaaaaaattatctgggcatcgtgctgcacacccatggtcccagctactacaagaagctgaggcaagaggatcacttgagcacaggagtttgaggctgctgtgagctgtgatcatgccactgcactccagccggggcaacagagcaagaccctgtctctttaaaggggaaaaaaatctagattttatttattttcttgcaatttaattggatagtaattggttttttgttgtggtttgcctcattttttttggttgcatggtaattatctataaatagattataaacttcttgatgatagagagcatattttatactttataaaaatattttcatgtggcagaaaatagtgacaaaatcagagaactctgaacttcctgtgatcctagaattgagagttaagccaaatatacaaaatctttgaagcctcaggtagattgggtgcttggtcttcaactccattccactctgatcctagggtgtcatcctgtactgcagatattagaaagcaaatacacacactcttccccaactccctacagcaggtttctaaacatccatccagcccagccaatctgatgcacttgcatgagatgtagaaggtgtaggttgactttcgcttcccttctgctgcctctgttgagagcacacaatgctggaggtgtttggttcttctgcagcagggttcgtgaaagttgcagggtttagtcagtaaccacaagtcaagaaggaggccgtaaggcatgcatgttgctggtgcacgtggttctgtatgtggcatgattctggagctggcagtagtagtaatggcgtcctgattgtagcaacgataatggggtctggagccagaaatgtccaattcccaatgtttgtgatgtgtttcactacttatgaagcatattgatgtatcttgtaaattttagttttaaagcatcaccctgattctcagaggttagtggggcagatactaccttcattttatagatgtatggcagagatgagtggcaggcttggccacacagtagaatgtattaggaatgatgcataaagttctcctgactccatagttagggctctttcctcctcaagtactgcttttcggggttttgttttttttttttttttgagacagtctcgctctgttgcccaggctggagtgtagtggcgtgatctcggctcactgcaaactccgccttccaggttcaagagattctcctgcctcagcttcccaagtatctggcactacaggcacctgccaccacacctggctaatttttgtatttttgtagagacagggtttcaccatgttggccaggctggtcttgaactcctgacctcaggtgatccacccgcctcggcctctcaaagtgctgggattacaggcatgagccaccgcacctggcctctgctgactcttcttatctaagatgattattcaccatcaggacgttttttgcccactcttccctgtggttgccacttctgcttagccaggcattggcacccttgtgcagtgagcaacctgcacagttgcacatggcagcccttgttcttgccagtataacagcatgggttgttgataccagtgtagtggtagtgtgaggttctgttgctgtttgtttgttaactgttaattattttccacaggtattagtcactgtaccactggctttactacagaaaggtgccattcagtttaatccaccgttgtcagagaagaagatgaaggctatcaacagcttaggcgcaggcatcattgaaaaggtgactgaaatgacctcatcctcagcaagaaagagattaatgtcagatgatagatgttaacttctgatatggagaagtagtgggtactatctaaatacaaataaaactcaaggatttccttttcatttgagtaattgttcgtgaagaacacagaagaatattatcaaaacgaaaggaggagagctggctgaggtctgtgagttttgactttaggagaaagaatcttgttattcacaatttgaatttggtataagcaattcttttatccccttttttccccccttctgctttctttcttgtctgctttccactcattggccccagtgaggacagaggtttatttctcctgcctttaatatctcctgtagcagaatgggccagtgctgcagcagattctgacagacctatgagtagtgagagtttaacttagggacatacgcccaggagtgagtcttaggaatgctgggcatcttcagactagcttctaggttgccagtgggttccattatccatgggaatggaactgagtggcatcaaaagcaaggagctgggctgggcacagtggctcatgcctgtaatcccagcactttggaaggctgaggaggacggattacctgaggtcaggagttcaagaccagcctgaccaacatggtgaaacctcatctctactaaaaatacaaaattcgctgggcgtggtggtgtgcacctgtaatcccagctacttgggatgctgaggcaggagaatcactcgaaaccggaaagtggaggctgcagtgagccaagatcgctccattgcactcctagctgggcaacaagagcgaaactccgtctcaaaaaaaaaaaaaacccaaaaaacaaaacaaaacaaaaaacaaccaaggagttcacagggggaaaaaaggaggtgaggagaatggaaagagcggtatttggggttgttctttcgggcagtgtctttgttttagagtagagctacaggttgctgcttagatattgcctgtggttttgtgacgacagacacctaaccacctttcttctgctcactttgcagattgccttgcaatttccgtatagattttgggacagtaaagtacaaggggctgacttttttggtcacgttcctcccagtgccagcaagcgagggctttttgccgtgttctatgacatggatccccaggtaaaatcattcgtgaactgtggtttgaatttccgtcttaaagtttagaatttgatgtgataattactcacctatcaagctcaggaactaacgaacatcatggagaccctgggtctatgtttatattctgggaggacacttggactggacattttcctataggaaaggagccccagtatttgccatgtcttcttaaagtcctcatgttgctccctgggacatgaattggatgcttgtggaaactgtcatttcaggctatgggggaattcctcttaggtgaagttggagacatcagagtcaatgagtggtgcttgaaacttcctctctgagggtcctctagggagctgggaaagggtgtatgattggtgagggagggtgtgagtgtcagcagatgtgagagctgagggaaggaaggagagaggagaatggcatacccagagctggacgggggtggtcactttctctgccgtcatgtcactgccacacgaaagaatcatggctgtttctgactttcagtttcaagaaactttgtcttaaaaggtttcacataggagccgagggcagattttctttaccatttgaggtttttttatttttcattgttttatctgcagattttccttctccatctctttctacttcttccgaagcaagctttaattagtgaacagccaagggaaccttaaagttgctatttacatttcttagtgtttttcttttccagcaggaagcaatagagtggatggatgaataatgagtgtttgcgaggaaaatggactggcgagtgacgtgcggataagggacagccagaaatagtgacatttaacttgtgagagtgaggctcttggccgggtacagtggctcacgcctgtaatcccagcactttgggaggccgaggtgggtggatcacctgaggtcaggagtttgagaccagtctggccaacatggtgaaaccctgtctctactaaaaatacaaaagttagccgggcatggtggcagacgcctgtaatcccagctactctggaggctgaggcaggagaatcacttgaacctgggaggcagaggttgcagtgagccaagattgcaccattgcactccagcctgggtgacagagcaaaactctgtctcatttaaaacaaaacaaaacaaaaaacaaaaaaaaagaggcccttatctgtgggagctgagcactcacagacctcctgcttttcctttcatgtctccagaagaagcacagcgtgctgatgtctgtgattgccggggaggctgtcgcatccgtgaggaccctggacgacaaacaggtgctgcagcagtgcatggccacgctccgggagctgttcaaggagcaggtgagagagaggaagccctccttgaaaggggcaagccgtgcttgctatccagagcaggtgtgaagcccaagcagccagcgtcactgagaatcacaggaaggaaggcagaggccacagtcttctttctttcagagtcccactgcccacctcagcactgagattagtctgtgagggctgtcatcacagagtaccgcagactggctgccttagacaacagaaacttattcctcacagttctggaggctggaagcctgagatcgaggtgttggcagggttggtttctcctgggtcctctctgtttggctggtagatgctgtcttctccctgtgtcctcacatgggcttccctctgtgtgtgtctgtgtcctcatctcctcttcttatgaggacacaaatcagattagattaaggctcaccccggcgacctcactttaaagtaattacccattggagaccatgcgacgaaatacagtcacattctgaggcactgagggttagggtgtccacatgggaatttgagggagacacggttctgcctgtaacagtgccctgtacctttttttacacaattgtcttccttcctttttttcttctcacatcatacacacttccctttttttttttttttgtaaggatataaaaggctcggtattttctacgtggattctatatttactgaagccctagaagctttgactacagctttccttttaagaggagccttggccagctttttttaatatcgcacacatgcagatagtctcttttctccacggagctcaggatactttgtttgccagtgtactaaatctcaccatctctggagatttgtaaatggccatggcttacatctttttgaaataaaggagcagaaatagaagtgaaatgactcaaaagttatgtaagttaaagagaaaggggcattcagatatgttgcttattttatttcattttaatttatttatttttgagacagagtctcactctttcgcccaggctggagtgcagtggcacaatcttggctcactgcaacctccacctcccgggttcaagcgattctcctgcctcagcctcccgagtaggctgggattatgggtgtgctccaccacacccagctaatttttgtatttttggtagagacagggtttcaccatgtttgcctggctggtcttgaactcctgacctcaagtgatccgcctacctcggcctcctaaagtgctgggattacaggtgtgagccactgtatggccagccttgttgctaattttatatgagaggatctatctaatgatgcaatcccttgcttggggtttttgttcagaagtttgttttttacattagttgtttggaacttagcttaccgtttctatagaaatattgtttatcgtgttgcttgttggaggccagctgacaaattacagtcgttctctcttactcgaggctttgctttcatggtttcagttactgtggtcaaccaaggtctgaaaatatttgatggaaaattccagaaatagattcataagttttcagtcatgcaccgttctgaagagcgtgtccagtacctccacactgtagacattgcctgtccattagtcactcaggagtcatctctgttatcagagccatgttcacataccttttatttcagtatagcgttataattgttctattttattattgtcattaatctctgtacctaatgtataaatgaaactttatcataggtatgaataggaaaaaacatagtgtgtatagtattggtcctatccatggtttcaggcatcccctgcgggtcatggaacatattcctggcggggaagaggggactgctgtattttaaattgagtgaatgtgaaacataaccttgtatcactgttttgtggagaaccctgttgagaattccaacctgtgatcctgagactccatccttcccttttcttcttgggccagagactcctttctgctaccacacgatggaaaagggaaggcccgaactcttagccatgggtgatagcccccagtagagggagagtgtgtcccgggcagaaggaggaggtatagaagtgagggaattgtgtgtgggtggggcaggaaagagaggataagacacaaataccggcttgggtagatttaaaggcagcaggaggaacatcttgagaactactgtttcagaatgatacaggaatagactcaggtcctaaacagggggcaaaatgtatgagttgggttgtaccatgtctatctcccttctttttttttttttttttgagatggagtctggctctgtcgcccaggctggagtgcagtggcgcgatctcggctcactgcaagctccgcctcctgggttcacgccattctcctgactcagcctcccgagtagctgggactacaggcgcctgccatcatgcctggctaatttttctatttttagtagagatggggtttcaccgtgttagccaggatcgtctcgatctcctgaccttgtgatccacccgccttagcctcccaaagtgctgggatgggactacaggcatgagtcactgcgccctgccatctacatcccttcttgatcctacttcataattcctttctattggacataggaggtcccagatcccacaaagtattttgtcactcggtggagcacagacccatggatccagatggcatacagttttgt

SEQ ID NO: 606 - DNA, 181 bp, Homo sapiens
cacgcctgtaatcccagcactttgggaggccgaggtgggcagatcatgaggtcaggagatcgagaccatcctggccaacatggtgaaaccccgtctctactaaaatacaaaaaattagccaggcctggtggcgcatacctgtagtcccagctactcgggaggctgaggcaggggaatcgct

SEQ ID NO: 607 - DNA, 117 bp, Homo sapiens
ccgggcgcagtggctcacgcctgtaatcccagcactttgggaggccgaggtgggcagatcatgaggtcaggagatcgagaccatcctggccaacatggtgaaaccctgtctctacta

SEQ ID NO: 608 - DNA, 309 bp, Homo sapiens
ttttattttaaattttatttatttttttgagacggagtctctctttgttgcccatgctggagtgcagtggcacgatctcagctcactgcaagctccgcctcctgggttcacaccattctcctgcctcagcctcccgaatagctgggaccacaggcgcccgccaccacgcccgactaattttttgtatttttagtagagacggggtttcaccgtgttagccaggatggtctccatctcctgacctcgtgatctgcctgcctcagcctcccaaagtgctgggattacaggtgtgagccaccgcgcctggcc

SEQ ID NO: 609 - DNA, 21535 bp, Homo sapiens
cgcgcccggagcatctccctggaggaacggagacaaaggaggattcatgtccaaaggtagggcggccggccaggccaccggcacccgccaggaggaggctgcggccccggccagcgcggctggaggcgctcctgggggagggtttccgcgccgaggagcccacgcgcggtgacagatgcgcggacacacgcacacacggtggcacccacctcgagagagacaatcttggagagaggcagacataggacgcggggagacgcagggacccacggacacgcaagcagggacccagatgcgcacagaaagccccatgctggagtacaccaagacacgcacacacacacacaccacgcacaggtgccagggccatgccagccggatgagagacctgtgcactgatacatacgtcccctcccccgcaacccctacaggcacacgctgagacaggcaccagctggtggtctccaagggaacccgttggcctccagaggactgggatgggggaacgggtgtcccagggccctctgctcctgcgaatgggaaaggaccgagagagctttcgtgattccttttcccagagcctagggctggaactggggtgggctggaattgcctttgtggggggcggtggggtcctgaaggctgcggggggctgaggaagatccatcttcagggtggaaggaagagggggggcctgcactaagcaggtgctattttggaaaagtaccctcccccagctgctaccttcctaacacaggggtggggtccctgggccagacaaagccaaagccattcatttgcctgtaaaaggaagtgccagggtctttgcttagcatgggaatggaggggctgtttcttggctgcaaccgagtcaggtggatggtgcctctccctggagcactgatggggcaggtagcttctggcagagggtgctgcaggcagatcccccttctccaggggccctaggagagccaggagctgaggggggccccaaggaccatctagccaggatggcagacttgagctgcaccctgctgtgacccgagctcttccccacccttggggagcccccctccaatccttgttgcagaggaaggaggaggtctcaacaattctactcccttgactgtggcggagacaacagccattgctcactggggggtcagctgctctgcatggggagaagcatctgagggaagagaaaggtgatgtgtctgatacctgcctcactctgaagttctcattcactcatcattcattcattcacttattgaggagtgcctgtggtatgctgggtagactggggcacagagatcaataagacacggccccgccctaaagaagggtgagaactagtacgtatttgtgccagataatttacattcttcattctgtataaccttcatagaaacccagcaaggtaggttctatccccagttgtctgagcagaaaatgaggctcataagggtcacccagccaggattcaagcctgggtcacctgcccatctgacgttgacatggtgggaccaggggagttgtagggacagaggatggaactacagaatccagctccagagcagcattggttctgtgccccagaggtctttgtttatttgtcaggcacccttaccagacagggggccctcaagggcaacaaccttgtctggggtacataagtgtccttggaatttcgcctagggcttggctggtgtagacccccatttgacagcatatgaaatggcctagatgggatggaatgaatgaatgagtgaatgtgatgagtaccagaaaatgtgcagtgggcacagaagagggccatccacatcagaaggcaaagcagaggctttcctgggagtagcagtggggctgaatgctggaggaggaggaggaggaggaggaggaggaggaggagggagccaggggttggagggggaacaggatcttccagcaaagcttgtggcacagtgacctgcacacatttactgtacttggggctggtgggtggcttgttagcatgtgactggcatgtcactggcatgtggtggggaggctgacttgccagcaggcgctgtgtacagtgcacacagtgggtgctcatatgtgcttgttggaggaatgaaagtgagatctaccaggtcctggtcctgtagtgggcctgtggtagcccctagatgctgcttggggatctggtaggaccctctctccatcagggtctatcttttgggcgtgctcttttaggatgctgcagttgacaggccagggcggagcaggccatggtgagagcacacactttataggaatctttacacaacctctcataagtaaatacaaggcatactttccaagtctgtaaaatggggataagaccacccccccaaaccatgtggctctatcttataacacaggttgagaccaaatgggctcagctgcagaggcataaggggcaatggaaaggcccagcttgtgtgagcagctgggcaggaaaaatggggcattggtcccagtgcaggtgtgctgagtggggcctgtgagccacgtgcaagagtggaggagcagggccaggctgctgagagtcagctgctgcagggctgggccaatcttgctgccatgcggagctgcctggctgggaacagcttcctgggaagcaagagagagccatgccaggccctggggaggtcctgaggctttggcagatttggctgtgcctgggagtgacagaagaaagaacagtttcccattgggagagagggtcttaccagtaccggtggaaggaccaggtggagggagatgagagtaggctcctggctgggtttaggggtgggaagggaatacttctgtcccctctccctcccgcccatctgctgctccatcaggcctccctgtaaggttgagactctgcagggtgttagtcatgaaacataggattctagaacggcagagctggaaggtgtcctcaagagcacatggagtccaacaaccatgcttgtgtaactggcatctggggacaccttcctttaaccaatgctttcacatgtactgtttcatttcccctacagacctgaaaggggctggggcaaaagggtctgggactgtaagatattgctcagtgccttttttttttttttttttttttttttggagacagagtttgactcttttgctcaggctagagtgcagtggcacgatctcggctcactgcaactccgccttccgatttcaagcaattctcctgcctcagcctcctgagtagctaggattacaggcgcctgccaccatgcctggctaatttttgtatttttaatagagacagggtttcactatgttgatcaggctggtctcgaactcctgacctcatgatccgcctgccttggcctcccaaagtgctgggattacaggcgtgagccaccgcgcccggccattgctcagtgcttctaagcatcatgtctcatgaaagctcaccacagtcttagtgatgatctttccattttatagagagggatgcaggctcatagtggggaggtggtcttcccaagtccacaaagctgagaagtagcagagccaggctctttccacttcaccccataccccaattgtatggatggggaaatggaggtgctctattctggaacctgccctggtggacagtggcctgataaggaaacccacagatttctcctgtgtatgaacacacccatgatccactaaacccagggggacgtttgcccttcctcactagggaggggctggttcctcagccttctctttcatctgctatccaccactccaagagcacactgtgtcgtcttaggcaagtgactgccctcatctggttctcatcccctccccactggttccacagattcagaacaatggctgggagggtgtctgggctccttcaggtacagacacccctactctgcagtggtgctcatggtacagaggggacatcgaggctgggagacgagagtgatagccactctccagagaagggtagccctgtttgcttctaaaagatgaagcagccgaggtcagtgacagttaatagatgttagtgcaggatcctaaaaagtctttgccctttattcggggagggaggcatgactcaggtctgaacaaccccagacatttcttagaccagtggttctcagccagggcaatggtgcttcccaggggacatttggtaccatctagagacattttgggttgtcacagcctggggggctactaagatcaggggtgccactaatcatcctgtaatgcatgtgacagcctcccacaataattactcaaatgtcattagtgccaagatggagcagcccctgggttagatgcacagatgtgggcttcagagcagtgaggtgcatttgaaagtgcccagcaaccagagaacctggcactggcccagattttacctctgacctgctctgtgttcttagttgagttctttctcctccaggcctcagtctctttgtctatgaaatgagggacctggactggatgatactaagatcccttccaggcccaactttgtatgattctgtagcaagagaaaaataccatggtttccatgtgacctctgccgtcctcctgatcacccctccgacccctcccaccttggctctgcagggctcccagagaccaggacggacgcagccatgtcagagctggtgcctgagcccaggcctaagccagcggtgcccatgaagcccatgagcatcaactccaacctgctgggctacatcggcatcgacaccatcatcgagcagatgcgcaagaagaccatgaagaccggtttcgacttcaacatcatggtcgttggtacggaaggctgtggggctgctgcaggcctggtggcgggcagcaccaaggatcccatttctttcccccaaatggctgtgaccctggctcttctaagatgagctgtttgtagaagggagaatttcaccatgctgatcacaaaggcctgacccctgtctccccttaagactagctgacccaggggtaggagcttcaggtggatgccagcccagccccccatcaccagctcggtgtacacaggcagccccttcaccactctgatcctgcttttgggtttgtgacatgagagaatcagcaatgttcttccttacctctgagagctggtggaaggattggatgaagggtggtcttatttctactcttttgtagtgctttaaaactttgagagaaggccgggtgtggtggctcacacctgtaatcccagcactttgggaggctgaggtgggcagatcacctgaggtcgggagtttgagaccagcctgaccaacatggagaaaccccatctctgctaaaaatacaaaatcagccaggtgtgatggcgcatgcctgtaatcgcagctactcgggaggctgaagcaggagaatcgctcgaacccgggaggtggaggttgcagtgagctgagatcacgccattgcactccagcctgggcaacaagagtgaaactccgcctcaaaacaaaaaacaaaaaacaaaaaagattttgagagaatttccagggatttggtcactgagtagcatcactgcgtcacagaatgtaagagtaggaaggggctgggcatggtggctcacgcctgtaatcccagcactttgggaggccgaggtgggtggatcacctgaggacaggagtttgagactagcctgaccaacatggtgaaaccctgtctctattaaaaatacaaaaaaattagctgggcatgatggcacatgcttgtaatcccagctactctggaggctgaggcaggagaatcacttgaacctgggaggtggaggttgcagtgagctgagactgcaccattggaccccagcctgggcaacaagagtgaaactccatctcaaaaaaaaaagaagaaaaaaaaaagagtaggaagggacctttgccccgtctcagtgagatgtccagtcagtgctgaaaaaggaatctggcgtcatccttctgtcctcttcctccttcatcccccaatcagtcatccagtcctgtccattttacctcatacgtatctcttacgtctgcccacttctctcctctctcttgctgccaccctatactgactttctctcacctggcttgccgtggccacctgactctgtgctgtcaaagtgctgacctgcagcaagataagctcagctggggcttgggccagagtataaatcatctggaaaatcttgctataaaaaacctccactgagctaaacagtgtgctcagtgacaaggtagatttctctcctgaggcagacttcttatctcaagaaccagtagcaaatgggtcagggaccctggtagctgggcccctatgggccacactcggagtggcaccaaccctcctagctctctgtctcctttcctctccaatcccttgtccaccagtgaccaaataatcttcccaccttgcaaaacttatcgagtcacccaacttacttaaaactctgtaacaaactctcctttaacctcagggtaagtttaaactcgtagactgtcctgattgtacctcttcagctcatctctgaccacttcccatctagcattgtactcctcactcagaagaggcagtgctcgtccacatgccatgctctctcctaccctagagcttttgcatctgctgttccctctggctagaactcatgactcttttgaaatcaaccttccggtttcagcttagttgcatttctccagaagtcttccttagtcccagagagactgggttggattcccttggcaatgctgtttcaataccctgtggctattctctttcacagtggttattgcaacatactataattgtctgcttatgttttggtcactctcacactaagcagctccttgagggtaaggatcatgttttgttcacgatagtacctccaaattttaggacaacacttggcacctaagaataattaatgaatgaatgctcttagaaaacatctcagagcaagcatggcaaatccaacacccgtgagccacttctctccccagtggtgtgcatggcagactgctagtcagtcatggcacgtgttcagtgctgagcccagatgtagcctttttaacataatggtctaggtgactactaccagataatcagcaggaatgagaaatgcaccttatttaccatccctggtcttgtccaatttcctctctcctcaccatcctatcagtaaagaaaccaaggcatgactaatccaaaggcattcagggaaaacaatgcaggtgggtctggaactctaggcccttgtcccccagcatggttctttttctaatataatcacaagaattcaccagcccagtatttcttagatcttattgtccataggactcttctggaagcccagttaaaatgcagattcagaatcataggtctggggtggggcctgagattctgcatttcctactagtgtccgggcaatgccgaggctgcttgtcaattgcaagtctttcttgtgggattcttgtacgtgttgaagtttgagaagctctgctcagaccagtgggtttgtttcttttgagacagagtctcgctgtgttgcccaggctggagtacagttgcgtgatcccggctcactacagcctctgcctcctgggttcaaacgatccgcagcctcctgagtagctaggactacaggcatgtgccaccatgcccggctaatttttgtatttttagtggagacagggtttcaccatgttggccaggctggtctcgaactcctggcctcaagtgatctgcccgccttggccttccaaagtgctgggattacaggcatgagccactgcacctggcctgaccagtggttttccctttttttttttttttttttttttttgagacggagtctcgctctgtcgcccaggctggagcgcagtggcgcgatctcagctcactgcaagctctgcctcccaggttcatgccattctcctgcctcagcctcctgagtagctgggactacaggcgcctgccaccacgccgggctaattttttgtattttttttagaagagacggtgtttcaccgtgttagccaggatggactcgatctcctcctgacctcatgatccgcctgtctcggcctcccaaagtgctgggattacaggtgtgagccacggcaaacggcctgaccagtggttttcaaatgttctttagctgtgaaacttttccttgaaatgaaatcttctgcagatatgcatctggaaaacaggtgaaagggagccatagcgaaggaagtggatgcaggggccctgcctgcccagcctcctcctcctctcacagtgccctctctggcatgtatcttcacaggacactaaggcttctgggagcacaatctaaaaaccactacactagaagaaagagtggatatagagccaagatgttattagggtttgagttcctggtcttgcatgtattagttatgttgctctgcacatattttgttagaagaggattcatctctctaggaccatctcaactgaggataaagatagttctgcttcaggatccacagggctgatataaaaatgaatttggctaacaaatgtgaatgtacaatatgcactgtgaggcagtatcaggatgcaaagtcattctatttttccttttagtatcattaaaaagtgaaaacctaagcaaaaaatggaatcacgagaaaacagaaaaccacgacactagacatatgcagaggttgtcccttttcccagtggtcctgtggctctgggaaggagagaatatggaatccaagtgatgtttccccaaggccctctgcagtaagcaggaagccattcccacctgcctgcaatccccactcagcctggccatcccccagtgagtggtcagacaaggtgtggcctggatcatggctctagaattctgtaagcttatggagaaatattaggctcaggaggtggatgcagagtctccctacctcctcctcctgctttgctgtaggccagagtggactgggcaaatcaacgctggtcaacacgctcttcaaatcccaagtgagccgcaaggcctccagctggaaccgggaggagaagatccccaagacagtggagatcaaagctatcgggcatggtgaggaccaggcagggacccctatgggctttgttcagtgagtgcctctgctggaaaggggaaagaatggggcttattgaagaataagatcaataaaaggcaaccttaagacaaaacagacgtgagcacttcactctgaagcaaactccttagactgcaggttcagggaagagagagcagggagctcgaatggaaggaggtgagatttgaggtggatgataaagtacaggatttagacaggtagaaagaggtaaggagtgggcaggtacggtggctcatgcctgtaatcccagcacttcgggaggccaaagtgggaggatcgcttgagtcatggagttcgagaccatcttggtcaacacagtgaaaccctgtctctttttttgtttgtttgttgtttgtttttttgagacggagtcttgctttgtcgcccaggctggagtgcagtggtgcgatctcggctcactgcaagctccacctcccgggttcacgccattctcctgcctcagcctcctgagtagctgggactacaggcacccgccaccacgcccggctaattttttttgtatttttagtagagatggggtttcactgtgttagccaggatggtcttgatctcctgagctcgtgatccgcctgccttggcctcccaaactgctgggataacaggcgtgagcaaccacgcccggcccgaaaccctgtctcttaaaaaaaaaattagctgggtatgatggtgcatatctgtagtcctagctattggggaggctgaggcgacagcatcacttgagctggggagttcgaggctacagtgagctgtgattgcaccactgcactctagcctgggtgacagagtgagaccctgtctcttaaaaaaaataaaagaagaagaaaaagaaatgagtagagagggtattccagattccaggtacagggaacagcataagccatgatatcgagatggaaaagaccctaaatttgacttttccaataactgatcctgaagacaaggcctgggtctccctggctagtaggctgccaggtacctggggtcagctgtaggactgacctctctggtacattttcttttcacccccagtgatagaggaaggcggtgtcaaaatgaagctgaccgtcatcgacaccccaggctttggagaccaaatcaacaatgaaaactggtatctgtctgcctctgagatctttgccctaaagactctgctgggaagatacttactatggtgcagattcattcacgttgagaaccatctgcaccctccatgctctgtagttcccgacagcccaggccagggcccctggggagctccacccctgctaactaaccatccaggaaagccatcggtgcgggggctgagggggaatctggcagcaggtatcctaggcccaccaaccagggaatgacatgaatgtaaggagattgctaccagatcatgcctaagctgagccctaggtcttgttcttctgatgcatctatctactttccctccccatcagctgggagcccattgagaagtacatcaatgagcagtacgagaagttcctgaaggaggaggtcaacatcgccaggaagaaacgcatccctgacactcgtgtccactgctgcctttacttcatctctcccacaggacactcgtatgtaccaaccctacccctattgtcaggcctggtctggtttgtatcatctgtgcccatctggattggatgatccatacgttgactcagctaggcctccctagctgagtcctagcccttccagccagatgggttggtacatagtcatggcccatgaccttgggattccctagactttccacgaggaagtttgactttcttgctaggaggttaaagctgtccaacatcagccaccaatatctgcccactggtgtcccagcagcatggcacaactgtatcagcaaagaggacttggtgaatgtgagcagagggcacttcatttattcaccaaatacctgctttggaaaataattggagtcggagggagcagcaagaagggtgaaatagggcagtgcagggctcctggattggggctggtgtttggagggtagggacccagttgtaggcatttagaaggtaccagcctggagtgaggcattgtgtgttcagagatgaaggccaaccattgtcatgaagtactatctgataggcagaataagacacacacaagcatgttgggaactctgattgtgagtgacaggtgggccccatgaaggaagtgctgggaacaggcagaggatggagatcctagggggcaggccagaaaccttcctgcagagaccgggggaggggggtcccataacattactaagcccagctgctgggccagagttaagctcttcagaggatggcacaagcaaggtaagccccaaattttctaggaaccaggcagtgatggtagggggagaagagagatgaaacaagacccctgggctagacccaggaactcaacagaaggctggttttatccctccctaggcttcgaccccctggtcagaatgaaccatcagacagactgacttagtgagtccctgagattgcaaaatagagccaagttggggtctcagagcctgaggtaggatgggggcatagactgtcagattgtgggaagggcaaggcctccagtttggccctgcaggactaactctgggggctaggaggagacctgtcaagaagtagtctgataggcagaacaagatgtacacactaggcacggtggctctcgcctataatcccagcactttgggaagccgaggcaggaagattgcttgagtccaggagttcaagaccagcgtgggcaacatggcaagacattgtctctacacaaaatttaaaaattagccagacatggtagtgcgcaactgtggtcccagctcctctggaggctgaggtgggaggattgcttgagccctggaggtcaaggctgcagtgagccaatgaccatatcactgcactccagcctgggtgacaaagtgagaccctgtctcaaaaaaaaaaaaaaaaaaaaagacacacacagtgttgtttttttttggttgttgttgtttgttttttgtttttgagacagacaaaaaaggaaaaaagacacacacgcacaaggacatatgagtagagacagtagtccacagatgctcccaggagaaagaaatccctgagtcagaaaagatgtcctgaagtggtggtttgaggggggcttaaagagaggcagaatctgcaaggggactgaaaaagaaaaaggcaggtgttgaggctgctctacagacggcaaggcagtggggctgtgtcggagacgagaggtagcagcctcttggcctcagccagatgcccagcccagtcctcttctcctgtgggtgtcctggagtggtggtggtggctgagttggggagggcaaggtggctctgatgattctgccttttctgtgccccagcttgcgacctctggatcttgagttcatgaaacacctcagcaaggttgtgaacatcatccctgtcattgctaaggctgacaccatgaccctggaggagaagtctgaattcaagcaaagggtgagaaggccccctgtcttcttttcctgttcccatcccctcctttctctccgctgggttcaggccatctcctagccctcatcattctgccttcacccccaccctcaaccctcccccaattctccaccccagcccccttcttaaccattcaagaggctgaggttggtggtatctggggactatgatgaagaaaagatggcacagctctgggctgccttcttcccaccctccaaacctacctgtgaagaccactgaatacatgtatcactgtgtacataagaaatcactcctccaacgttagcctaattgaagggctagactaattagtgagtcaactggccactagtcctcactggcatcttctctttgttttttttttggagtctctctctgtcgcccaggctggagtgcagtggcgtgatctcggctcactgcaagctccgccttacgggttcacgccattctcctgcctcagcctcctgagtagctaggactacaggcacccaccaccacgcctggctaattttgtttttctctttttagtagagatggggtttcactgtgttagccaggatggtctcggctagtcttgatctcctgacctcgtgatctgcccgcctcggcctcccaaagtgctgggattacaggcgtgagccaccgtgcccagccctcactggcatgttctataagctcagccctgtgctggatgtacagggttggggaggggcgatttgagagaaatgaaaagacaattgctgcctttaagaaatttacaatccagttgggcgtggtggctcatgcctgtaatcccagcactttgggaggcagaggcgggtgaatcacgaagtcaggagatcaagaccatcctggctaacacggtgaaaccccgtctctactaaaaatacaaaaaaattagccgggtgtggtggcgggtgcctgtagtcccagctactcaggaggctgaggcaggagaatggcatgaacccgagaggcggcgcttgcagtgagctgagatcgtgctactgtactccagcctgggcgacaaagtgacactctatctcaaaaaaaaaaaaaaaaaaaaaaagaaacttacaattggctgggggcggtggctcacgcctgtaatcccagcactttgggaggccaaggcgggtggatcacctaaggtcaggagttcgagaccagcctggccaacatggtgaaaccccatttctactaaaaatacaaaaattagctgggcgtggtggcatatgcctgtaagcccagctactagggaggctgaggcaggagaatcactggaacccgggaggtggaggttgtagtgagccaagatcgcaccacggtactccagcctgggcaacagagcaagactcggtctcaaacaaacaaacaaacaacaaacaaacaaaacttataatcaaatagaaaatgaagaggtcctggatggtttcctggagaaggcaagacttaagtcgaccttgaaagagggcaaacagtctcggagtagggggagcctcacctttcttccttccaatcaggaatataacatgcaggggtctgagcactccccagtgggctcacctgtgctgcttgtgtaaatcccagtctcgcggaccctgagatgagcaagctggttgcgaggcgcctgggacctgaagttgcacctcctggcctcttcctcctctcaggctaggttgtaattgtatagctggggcttgcatttattcaccatcttcctgctgctcagggtctcagagttcagagatgactgtggattatccaaggctggatttggctctctgacctcagctcacgcacacaggtgcacacacccctcttttccattaccctgacacttgactaccttgtttcttctcctcgcctctaggttcgcaaggagcttgaagtaaatggcattgaattctacccccagaaggaatttgatgaggatttggaggataagacggagaatgacaaaatcagggtgggtgcctggggcactgctcctccactgatgcccccttgcgacctctgggatgtgtattgtgcacgtcctctgtctgtcttttccctttctgtactccccccaaccttgcctgacccagaccagaagtgacatagggggatggggaggactatggccctggactgtgaacccacagaagggctccctgtacccagaaagccttctatccccagaccacataaaagcctccttttccccaacaaggtctggcaaaaacagtatttggggtgatgggaggggcagcaggcaggaagagcatcaggctggggtccaggaggatctatgctgtggtcagaccctgccttagtttcccctctatgaaatgcaggggttagactgagtggcttataggcttcccccgctagaataacttaaaaaaattaaattggctgggcgtggtgactcatgcctgtatcccagcactttgggaggcctaggtgggagaatcgcttgagcccaggagttcacgaccagcctgggcaacatggcaaaaacttatctctacaaaacctgcaaaaattagccaggcatggtggcgcatgcctgtaatcccagctactcgggaggctgaggcaggagaattgcttgaagccaggaggtggaggttgcagtgagttgaaattgtgccattgcactccagcctgggcaacaagagcgaactctgtctcaaaaaagaaagtacaaagcgctctgcagctgaaggagagctgattcctgaggttaaccagtgaggcagtggtacaattgggactagacccaggactcttcaatctcagtcgggtgctcttttcaagagactgagccttgcccttgccatcagtagtatctctgaatgagcatcagaagtgtgtggttcaaggctagaggaccatatgccatcctgctcctgaaagtccaggttgttggaggatgacggtgcacatgtgtctggtttgtgtttctgccccgtgcagcaggagagcatgccttttgctgtggtgggaagtgacaaggagtaccaagtgaatggcaagagggtcctcggccgaaaaactccatgggggatcatcgaaggtaattcactgcatcttctggaagaactggttgctgatcagttatccagtcaccatttattaagcatctataggtcaaggcactgtctcaggacatatgaaatgaatgccagccagattctgcccataaggagcttacagtctcattgagaagacgatgctcacaggcaggagtaacaagagactgatttagcacctgactgggtggcactgacttagcgcatcaaaggagttcagaacatggagagattagtaaggcctggaaaaactggagaaaggttttcataggaagggggatgtgatctgacaaactgccggagggttgttcaggtgttgccatttccattttattatgaatggatgtgaccctgggcgggtcttgatgattctgaaagtggtcaaagaatcactttaatgatttcattcaatatgataaccctatgaagggaggagagcgggtgctcctgttctcagagtataagctaccaaagcaccggaagctcaggttaaaagccttgtccaaagcacataacttgttagtggtgaaacttgatttcagactcagattttttttttttttgagacggagtctcactctgtcatccaggctggagtgcagtggcgcaatctcagctcactgcaacctctgcctcccaggttcaagtaattcttctgccttagtctcccaagtatctgggactacaggtgcggaccccgatttttgtattttttatttatccccaaaaattagcccagctaatttttgtatttttcgtagagatggagttttgtcatgttggtcaggctggtcttgaactcctgacctcaggtgatccatttgccttggcctcccaaagtgctgggattacagatgtgaaccaccatgcctggtgattttatttttatttttaatagaggtgggggtctcactgtgttacccaggctgatctcaaactcctgggctccagtaatcctcctaccttggcctcccaaagtgctgggattacaggcatgagccacagcgcctggccccatgtcttaatcctcattctgttccaacagtgcttggccaatgatttgcaaatactaggtattcaatatatgttgaattggatttgtcatgtagtgcatgacctttttaaaatggctcaattattattttctctgtgttacttccaaccggattataagcttctgaagaatgggaagtgtatcttaggccttggccagtttctcagacttggtattagttttctcttctataaaatggtaaaaattatagtccctcttggctattatgccacagcgtctagaaggatgtcgtgcccattgtagctgcttaatatttgttcaatgaatcaaatccagtacacccaagtgagcaaatctctggaagggttacaaaaaatgacctgtcccatagctttctcctaaatgcctccgtgacccaaacagaagctcacctcctgggtgttgctgtattaatgaactgactacctgttttgctttgttttgttttgttcatagtggaaaacctcaaccactgtgagtttgccctgcttcgagactttgtcatcaggtaagatgtctcccctccagctgtccagacagcaggttgaattatttggggtcagggtctatctgttcagattcacctcctgcatctccaggtctctctgacagagctttctgccccagttccagctcctgttgcaaaatggaaggtgctgtagaagaatccttagctcctgggagtggttcccattcactgggtccagtccctcgaagtgatgtgtgtcaccgcctcctcttcctgcccctaattgcagccctcttcttctcaccctgtgtcctctaggacccacctccaggacctcaaggaagtgacacacaacatccactatgagacttacagggccaagcggctcaatgacaatggaggcctccctccggtgagcgtggacacagaggaaagccacgacagtaacccatgacgaccacttctctgtgtcatcacacatacccacttcacacacacacatcccaaataccaccaccaaccaccttcttcctctcaactctgtcccacaggcctgtctggtatttgtggagcatcttgtctgtgtgtgtgtgtgtgtgtgtgtgtgtgtgtgtgtgtgtgacagagagagagcgagagagcctgtgtgtgtgcatgcaggggtgaggtattttcactgccctccctggagagtcccttgtaagtttggctcctccatgcctgtccattatctgtctcctttccttgtgtcccaaaacaaagctgtttgcctcactcaggagatctgggggaggtttcatttaaaagtgctgggagcaggtgagccacaggcaactcttctctcggaacctgcacacaaactggggctatagagattctccaaggacagatggcagtggagctagacctgagtagggggcagggagttcaggacaaccctcctgtaagttgggggtggtctgggggtaaggctggggcttcctgggaaaaggaaggccatgagaaggcagagaagtaggccagagctgggttcttgcagaaagcatcagtgcctacaaatggagctccacccttcagtctgtgtcgtgttcagtgtcacaaagctaccacctgtcaccagagcctactgctgctctccactcaactggcctctgctgccaggccactgcctgtctctgcttccgactttgtcttctttctccctttccctccttccctcatacattgctttctctccctctcctgcgtgtctctgacatctctcacttccttttagatgaatctactttaggttcattcctatatttagcatttatgcccagtctacttccagaaatgactttagactgcctttcacataaaatcacaaaactacaggacagtacaaacagattgccagagaaatctgggtcaaagaaaggaataggaaagaaagtttctgtagtcaagcacctgaacaggccctgagctcacaggcagccaatgtaaagagggaaacacagtgagttatgcagttcccagtgtccagttaaaggaagcacacatgctagtcatgtgagacaaccttttattgggacatcaggttctagaactaattctaaagaagtatcagaaacaatatacataatttgtctttcttagtaatttggcttcaaagacaaatttttgaccacacctccgttttctccgtcagacttctctcccttctaagcaggcttctctgttgctccatttgcttcatacatacttgacctctcttttctattccccatcacttttgtgctgaagctaatcatatttatgtctgtctttctctacttttccctaattccctctcctcctgactcctgtagacattcccaatgatacccaccgtcatacatttaggcttttcttgcctttccctgaagccctgtatttattaatgcatatatttcccctgcttgttgtacaagtaagttactcttttcctttaatctgtaagattcatgaaattcggggccagggaaacagtttagccttagggaagggaaaacactaagtgaaactgtttacaataacctcatacaaccttctgtcccatctcctggttcagcctaggtgtttcactggtcctctatgaatcccagcacttataatcccagtcttttatcactcaggtgctaggaaaaaaaacatagactcaagacccaagattcaatggaccaggagaaaggggggcggtgatcaggtcaccagtgaccccaacctatgctctcggtctttcctggaggctgccaacccagccctcatcctcccttgctcacaaagttacagggtaggcacctgtcaggacagaacagcagcagcgctacagcccagaggttatacatttcaacagaacagggatccttggctactgtagaagcagtcctgtatggagaccttggaccagcaggggaagatctatgggcatgggaggtgggcgttggaaaggctgagtaggaatggtgcctggcacccctgaaccatgatctgagcctccctggagaaggtattttatatgtctgctgccagctgctggtctccacaccctcaaccgttctcaacccccctgcagggagaaggcctcctgggcactgtccttccacctgtgccagccaccccctgccccactgctgaatgaaggccatttcaagcgctgcttctcactccattcctctcagctgttattgctgcagggccaagccctttttagtgctgtgctcgtccagctcaccaccacagcccctctcagccctcagtaggtgggaggggccagctgcctctttaggccagttgcatcctccatttatccaaaccactcctctcctcccagtggagtggggttctgccagtacagccctactgcatcatctgcgtcagccggtcctagcccatctgcagggtgaaagaactcatcaagagctccttctgcccttgtaagcccatcccagctacttgtaaccatctctaagggcaatggcattgctccctacccattcatctgcatgagctactcttggcttccttaaagggtcaagaaagcaatttttctgcttactagattcattgagatcagctgtgtgagccccaaagtgggacaagggtgtctccttcattacttaaagatattcatgagggtgggtcactacagatgttggggagcaagggctaggatcactttttaaaaaatcaccacttgtggctgtcccagagtgcggttgtacatcctccccacctcataacgcagccactgaggaagagtggttttcctaagaagacattgctggagttgactttcttctgtccaaacaaacaaacaaaaactaaacacacacacaaacccccagaaacccacaatatgtacacgctaaggaaaaactagcacccttctgtccactcagcaataagagggatctcttcccacctaccctacctactcctacccccaacccccttccccattaatgtgagtaatgaattagcctgaccacaggtggtcactgtaggctaatggaaaatacccaagggagggcaaagccccccatcagatgcatgaatgtttgcgaatgttgactgccactgccccacacactgtgtctttatagaattcccctttgcccaccctcttcctgtctccacctggacacaacttgctcaaaggctggtgacttgtgggccattcatctacaaccaagtcctgatggagcaagaggcccacgcctaggggatgcaagaacaacccgtttcttaaatgttaccagtcccagccaatcttacggtgacattacagttaaatttcccaattgaaaacaagcaaacagacactcaaactggtcctgtaattgttgctagactttatgtgttgtacaactaaacattgctgtttgaacagtaactgcctggcctgtcttatttgtgctccttgaccaaatcagccattatgtcatctcacccatgtgtggagggtgagactctcttggtaagaaatagccacagatattagagatgaaaacactttgtgaggtcagttcatcttcagttggcgtcaggtcgggcctcagtcattattttctagtgtttcataaccaaagtgagtaatggatgggaggttgaggtgggaagatggcttgagcatgggaggttggaggtgcagtgagctgagatcattcctgacaggaccaacccaagtccatacctaaaggcagggggctaagggggcaggtgagg

SEQ ID NO: 610 - DNA, 508 bp, Homo sapiens
ggaaggtatctgttgcttaaaagttgtcttacctgaatgtctctttcttggtcccccacccccagccctttaatcctgaaaggtaagttggagccttgtatatatggaagtcctacacagaactctaaaatagggcaacacaagggctggacattcatttggtcttagaaagcctgtgacatgcctaaagtcacaccaaagctggctggtggcagtaagctgattggaatccagattgttaaaatctctactttgggcagcctcattcccaacatttcaagggctcagagtttttgggtctggaaaggtgcctagaaggcatccagtctaatgccttaattgagtcgttagattgtcagacccctttccctccaccccacacactcagtctgggcacctcacctaaattctggtcttcacttctccctacgagatctcagctctccctccatctgcagcccagccctgtctcctgaagtgcagatgtgggcagccagcagcctgctag

SEQ ID NO: 611 - DNA, 2706 bp, Homo sapiens
caaggtgtcgctctttggtaagagggatgaggaggtcgagtgtggatcattctggaaagatctcaaactgttgtggggcttctccttggacctggaaactttctaaagccatgtttcctccttgctccaaccagggagatgtctgcttttaaaaacaaaattgaaaaaattgaggccaggtgcagtggctcatgcctcttatcccaacagtttgggaagctgaggtggcccaggagtttgagacaagactgggcaacatagtgagaccccatctctacaaaaagtagaaaattagtgggccatggtggtgtgcacccataatcccagctgcttgggaggcgatggtaagaggattgcttgaacccaggagtttgggctgcagtgagctcagattgtaccactgcactccagcctgggtaacagagccagatcctgtcttaaaataaaagatgggactgaacagatgcctgggcacaacaaagcactgttggtcgcaggaagctgtggggcttacaccagttgctttgctccttgcggtgcctgctgctggcccctgagctctctactggagcagactcagccagaggggtgcccatctccaccttcaagcacacttgttcactaaggcctgactccactgcgctcacctctttaccccacacgccccctttcccgtttcctacactcaaactcagtctcccccgctgtgcagttctaaattgcgctcctttctgggctctgacttgccctcaatttccttttctcccaaccagcattgaaactcaagctggatgatgtgcttggggccagcacactcaggtcagtttgaatgtagttgtcaggaagatcgaagtagacgttaccaaatgctgatatccaggtctttcttctatctttccttcctccagaaagttttcttgacagatttatatgggccttagaggttgtatgttctcacctgcttcctacgtacctctgctgctttgttccattttgtggtagatgattgctcaccactctgacagtggtgtccccgtgagcacttactgagagccatttgagcacttgtcattccatggtgtgaagcctttcttttcttttcttttttcttttcttaagatatttttatttctccaaatttgttatttattaggagtgactgaaataaaaaacataattgagtcccatcatcatcatcatcatagaaatggctttaagagaaaactggtcagatgactattattgcttcccatttccaaccagtgaatagttgccactgataaattgacagcgaggagtctgtcaagaatgctcaagatagccgggcgcggtggcccacgcctgtaatcccagcactttgggaggcccaggtgggtggatcacaagatcgggagttcaggagcagcctggccaatatgttgaaaccccatctctactaaaaatacaaaaaaaaaaaaaacagccgggagtggtggcggatgtctgtagtcccagctactcaggaggttgaggcaggagaattgcttgaacccaaaaggtgaatcacccaaaaggtgaaccaaaaggttgaggcaggagaattgctccaccaaaaggtggaggttgcagtgagccgagattgtgccactgcactccaccctgggcaatagagggagactccgtctcaaaaaaaaagaatgctcaagatatgtcatataatacaacatgcctgttcaaagggggaaaaatcttaggaaataacttacatgtacttcttggtttcatcatacaagacaagcacaaaagcaccacccatgcctctgagaacactggaccatgcacccttgaaaacagctttgcttccttcatcatgagtaatcttcctccagcagtcaaatgtgcctgtgtacatgatgtcagttcctttgcatcctgactgcatcatcatgtagcagcaaatggtgttaaatgaataggaagtcaacccagcaacggcagtgacagtctgtgcatcatccaactgatgacaatgtgagtgttcttgggatccggaagcattccctttgcagtgtcatagttaccgaagtaggcagcaggcagctcggtagataataccctgcacagacacgttaaagccttggtacaggctcttaatcccgtcagatttgtagatcttaactaggcagtcaccgaaacctcgcaattccctttcagctccagctttgcccacatcagctgctacacgagtatgggcaaaatcaagagggtacacaaaacacaaggatgtggccccagtggcaccgcctgatgccagattccctgcaaagtagcgccaaaactgggatctcttgtccacaccatccaggaagatctgcttgtatttatctttgaaggtgaagttaagagcctgggtgggggaagtatctgatgacactggccaggttaccgcaccaggacaggactccgtgctccttgggaatacagaccatgcagtctctaatgcccttgtattgcttatctgcagtgatctgcttgctggcatgctgcacctgtagcagcagcttgacccgctcgatgggtgctaccgccatcttggagatggctgcggccactccacctgccagggagtccttggcgaaggacacagcagcctctgtgatgtcgaaagaggaggcaggctgctgtgggatgggactggtccgagaatcggctttgactccggggctg

SEQ ID NO: 612 - DNA, 13021 bp, Homo sapiens
ctgcaagtttctgttttaaatgataaactaatgaagaaaactgacttgaaactgatgagtgttctttatttgataatggttaagttatgattttggttaaaactgttgagtacattttcctttgcttatactcccattttctttcagtgggccacagttacatttcatcttcctcatcatgtgttgaagtccattgccagtgccattgtaaatgaactcaagaaaataaatcaaaatgttgctgccttacctgtggcgtcctcagtgatggacagattgtcttacctcttacctagtgcacgtccagaactcggagtggggccaggccgttctgtagacaggtatgaaccttgctaacaaaggtgacagtgagatagaattgattagtttttgcattaaacaaggaataactagaaaatctggttatgatttttaaaaatttcacaatttctagcctaattttgaaattaaaaaaaaatcaatatgaattagaatctgaaaaccagatttaaagtaaactgctacttgaattgctatttttaaacactatattttagtacactaaaggtatttgaagggattataaagccacattttggaaattccagtttagtacttgcttagtaaatattttagtcaaattaaaattactataattatttaatgattaataactatttttccattgatgacattttgtgacctttgagataaattttgcctaacttaccatgccctaatgtgagtataaggaaagtgctatcattttataatgaaaaaaaaaaaaagaccagtttaaaaaataataggaataattttgagttaacaattttttatgctgctcgccctggatttaaacagtattacaaaaatcatacctaaaccatcattttctttggtagaggtttttttgaatgcctattttgtttaattaattaaaaaaccagtgacacattcatttaaatacttaaatgatttgctatttgaaatgacgattgaggttcttacaaaaagtaccaaggtttagaaatgctgtactgaaatataatacgcagcaattttgattagatttttgtttgccttttcatgtagtatttatttatttatttttgagacggagtttcactcttgtcgcctaggctggagtgtagtggcacaatcttggctcactgcaacctctgcctcccagattcaagagattctcctgcctcagcctcctgagtagctggaattataaccgtccaccaccatgcatggctgatttttttttttttttgagatagagtttcgctcgttgcccaggctggagtgcaatggcacgatctcggctcaccgcaacctctgcctcccagattcaagcaattctcctgcctcagcctccttggtagctgggattacagacatgtgccaccataccggggctaattttgtatttttagtagagacagtgtttctctgtgttggtcaggctggtgtcgaactccctacctcaggtgatctacctgccttggcctcccaaagtgctgggattacaggcatgagccatggcacccagccaaattttcttttttttatatttttgttttgagatggagtctcgctctgttgcccaggctggagttcagtggcatgatcttggctcactgcgagctccgcctcccatgttcatgccattctcctgcctcagcctcccgagtagctgtgactacaggtgcccgccaccatgcccagctaattttttgtatttttagtacaggtggggtttcaccgtgttagccaggatggtctcgagctcctgaccttatgatccacccaccttggccgcccaaagtgctgggattacaggcgtgagccactgcacccggcatgcctggctcattttttgtatttttagtaaagacagggtttcaccatgttggccaggctggtctcgaactcctgacctcaaggtgatctacccgtcttggcctcctagagtgctgggattacaggtgtgagccactgtgcccagctgtagtatttatatttttacattttcattggatgtgacttgtaatttcctaagcatctttctgaagtacatttataaatagtatgtgcagatgttatcaaaggcactactgaataaattcattttaaacttctattatttttagtatggctcttctagttcagtagcaatatttattaatttatcttttggtaaactgatttctgcgtaatcacttaccctctttttgttagttaagtgattttgttgttacatatataacttttattagtcgtattaacaattgggcagaatttttatattctgtagtagtaatctcttgggcaacatgcagactatcatttttaatcagattatctggtgatatgtgctatggctgtcattaaaatattctttgggatatgcctgagatgggaaaaaagaaaaatacgtaattagaacaagtgcttcttgtctgagatctatgcctattttgagattataaaagagtcagctctgcagagctattttctttgcaaacagttgcagtgtttctaaagaaatcagtgcaagctgtggtaaatgttatattttaggaaatgcagccattagatgggatattcagtatttttagaggtgttaaaaatgtcctaaaatattaattttgatacagactgtggtgtttttttcattaaaaatcaatctaggagcctctgaaggctttgatgaacttaggtctgtggaaggtttgagttagggtctattggatgctactgctgttttattgggtaatataacgaaatgagataggtcttctgttctaagactgatcctaaagacacatataatgtgaaactgagaatgcatttctaaccaaacagctatttgtttaaaaacctgaatacaactacgagtaaacctaaagttactagcaattttatagaaaatcatgtgctaatttaagggaagaatttagaagagtattttcctgttttctttgtcatgacctttaccactttttctttctgttatcagttgtaattttatgttaggatgaataagctttgcttatcaatcctttcttactaaaaatcttttggacttctcaaaaagtttactatcgtcctttaaaaaattactctggtactttctgttatagtttgactcttagtgagctgatatattttaatatgaaaacatatgtaatctacccctggagttgtttatcaactgcagccaccaatcaggttttctccttccctttctgtttaagggaaattcccaaaaattaccgtttttagtttaaagtaaaaaattgaacttgttcatcagaccatttgcagtttttgctgataacccagtaaaattattttttgcattgttaaatagaagtttcactgtgatttgatgcctaacttcaattacataaagtatgtttacttttagatcactgatgtatagtgaagctaacagacgggagacatttacctcatggcctcatgtaggctataggtgggcacaaccagatcccatggctcaagctggattttatcatcaggtaaaaaaagaatataaaaaaatacttttctcagtaggcctttgtagccctcagcaaaattatcacatttttttaactttttcagaaacttattttgtgcaccttgtatgcttgcttgtatgcatggatgcttgtttttttggcccaggctggagtgcagcgccacaatgttggctcaactgcaacctccgcctctcaggttcaagtgattcctgtgcctcagcctccttgagtagctgggaatacaggtgtgcaccatcacacctggctaatttttgtatttttagtagagatggggtttcaccatgttgccaaggctggtctcaaactcctgacctcaggtgatctgcctgcctcggcctcccaaagtgctgggattacaggcatgccaggccaggaaaaaaattgtttaagcaattaacaactgagtattttctttaagattagatacaacttttttaaaaaacaattatttttattttttgtctttgagacagggtctcactctgttgcccacgctggagtacagtggccctatcaccactcacttcagtctcaaccttcccaggcacaggtgatccgcccacctcagcctccctgagtagctgagactacaggtgtgtgccactgggcctggctaacttttgcaccaacctaattttttttttttttggtagacacagggtttctggtgttgcccagactggtctcgaactcctgctcaagtgatctacgcacctcatcctccccaaagtgttgggattataagtgtgagacactgtgctaggccataattttttttataaaatcaacaaatagtattcttcagatttggtttctgacaagtattctcttttgatgcatgtttatttccagtgtttgacatctgcattcataacacagtagtagatgcttagggtaatgcaataaaagcagttttacagtttcgaaattctcattttagttgggatacaaattacccatatactagataactacagaagcagcattacaggtagtgcattgcaacttgaatatctgtgcattaaagaactgattaagttgcataggtagaggaagaattagtcaagaaaaacagtcatagttttgtgtaggaaaagaggagagtataaagtgtaaggattaacacgatacagaggcataagaatgggacattataaaaagctttgctgaattagagggaagttaagaaaaatgattttagctagatgtaatatgttatttaataggaaacttaaactgagtggtatagagtggcttaccactgttaccactgctaaaagaatctaagaaatctaatacttatatgtcagtttaaataaagcatggttatttaactttatttatttatttatttgggacagggtcttgctctgtcaacccaagttggagtgcagtggcatgatcacagctcactgtgccacagctcactgcagcctcagcttccaaacaattctcccaccttagcccctcaagtagctgggattacaggcatgtgccaccattcccagctaattctgtttattttttgtagagatgagatttcactgtgttgcccaggctggtttcaaacttctgggctcaggcagtttgcctgccttaaccttctaaagtattgtgattacaggtgtaagccactgcgcctggcctaatttaagaattcaagtacattttgaagtacgttaaagtaactgtcatttagaatctgaagattgattattccttcgttatcttcaagtattctgaacatctttactaaaattaaaccagaaaactatatatatatatatatatatatgaatattttattcaaagtttgtcagatttcctgttacagataggtaagtttggagactggctaatattagaatcagtgaaataatttctctaaattaaggattgaacatggaccatttttctagcaacttgtctttcttttaatttggtgtaattttctaagagtctctgttaagtgatgccttgattttttttttttctttctgttgagttattgttcattatattctgtctttgcagagaggtcaaataataggtttcctagaatactctgattctaggaaatgttaggggctgattattttaatcttctaaaatgtatagtaaatttgcatctataacgtaaatgttcacaaatattaatattagttttcaggtatatttcagttcaggttttgaaaatatatacatatatatataaattgtgcctggcccttgaattgaaatatatatagcattttgtcctatgttgtatgaattagattccatattatgtgaattagattgactactttgctttccctttttacttgcccttcttgttcagttgtatgtgattgagtatttaataataaacccattggctggtgcagtggctcacacttgtaatcccagcacttagggaggccaaggcaggaggatcgcttaagcccaggaatttgagaccagcctggatgctgtaaggagaccatgtctctacaaaaaaaataacagaattagctgggtgtcatgaaacacttctgtagttccagctggggggctgaggttggaggatcacttgtgcccacgagttcagggctatagtcagctatgattgtgccattgcactccagtctgagactctgtctctttaaaagagaaagttttaaagagactctgtctctttaaaaaaacaacaagaggctgggtgcagggctcacgcctgtaattccagcactctgggaggctgagaggggtggatcacaggatcaggagattgagaccatcctggctaacacggtgaaaccccatctctactaaaaatacaaaaaaaattagctgggcgtggtggcaggcgcctgtagtcccagccactcgggaggctgaggcaggataatcgcttgaacccggggaggtggagcttgcagtgagccgagattgcgccactgcactccagcctgggtgacagagcgagactcagtctcaaaaacagcaacaacgacaacaacagaaacaaatagtgtaaaccagccagactctttctcttatacttaatatttcagatgctttagtatagcaatgagaaaagtactagatcagggattgcatatatgtgtacctctctttgatttagtggtcattttctgaattttcaaataatgcaggcaattaataaatatttggaggtttcagtgtattgttggacctaatattataggctaattttcttattttcagtatagaattttacttaaaattatgaacttttaaaaataacttttattataaagctattttaataatgatttaccttttctgtctcttttctttataattttgcagcctgcctcatctggagatgatagagccatgtgttttacttgtagtgtatgcctcgtttgttgggaacctactgatgaaccttggtgagtcttgatgtttctgggcataataggctaagtcagtcgtgtaaataatgcttctaaattttacttttctgcttatgatataattttttgcctttttgccacctatatttttgtcattgtcctgagaatgagctagccctgtctatactctggcacaccacttggcatacagtgtctgtaagtttgactttctaaaaattgtacacaagggaagtaccaaacagtagaaccacgctctaacgaaaaccggaaagctatggtaaagtgaactccagcgtgagcttcagcagttgaatcttggtctgttgagagcatgttgtcagtagggaatccatggagagagccttatagtatacatttctaattttgaagtaattttagggagtctttgatgtctctgaattttagtgcatgaaattttagaacctggttaaacattagagatcatgtattgaaacttcatttttacaaataactattctgaggtcttattaatagaaataatagtatattattatagcaaatatttatataagatggtatactaggtaccattctgaatactttatgtatttttaaatcatttaattctcatgtttccctgtgaagtaggtactattgtaatctccattttataggagggaactatgaatattttccagtttaacctttacagtcactctatgagataggagttactatcccattttaaaatgaagagaataaaatttgctgaagggcatatggctagtgatagagccagggtttggttttaggatatgttgcttattttgtatgaaaattagtttgaagtctctgaatgttaaatcagctgatgtgcatggggcaaacttgctaaaacgtattgcagtgtacctatggagttcagattggaaaatactgtatgaaaaattcaagttgtatctatctgcaggcagagagttgaatacagtagtcccccttatttgcagggcatgcattccaggacccattggatacctgaaacagcagatagtactgaaccatatacatactatatttttttccctatacatccataacctatgataaagtataattcataaattaagcacagaaagagattaataacaataactaataaaattgaacattttttttcccttcagatggagtcttgctctgttgcccagactggagtgcagtggcgcgatctcggctcactgcaacctctacctcccgggttcaggcgattctcctgcctcagcctcccgagtagctgggagtacaggtgtgcgtgggccaccacacccggctgatttttgtgtttttagtagagacggggtttcgccatgtttgccaggttggtctcgaactcctgagctcaggtgatccacccacctcagccttccgaagtgttgggattacaggcgtgagccactgcgcccggcctaaaattgaacaattttaacaatatactgtaataaaagttctgtgactgtggtcagtctgtctgtgtttctctctctccaaatatcttactgtactgtactcatctattttgggaccatggttgaccatgggtaactgaaaccatagagagtgaagctgtgggccaggcatggtggctcacgcctataatcccagcactttgggaggccgaggcgggtggatcacctgaggtcaagagttcaagactagcctggctaacatggtgaaaccccgtctctgctaaagatacaataaattatctgggcgtggtggtgtgcacctgtaattccagctactcgggagggtgaggcaggagaatcacttgaactggggaggcggaggttgcagtgagccgagattgtaccattgcactcaagcttgggcaacaagagtgaaactccatctcaaaaaaaaagagtgaagctgtggataagagggggacctgttgcatgagcaattttcagtttaagttgagtttctgtttggaattgtctttccccgtaaaggctgtgtgtgtgtgtgtgtgtgtgtgtgtgtgtatatatgtgtgtatatatatatatgtatatatatacacacacacacacatatatgtgtatatatatatacacacacacatatatatgtacacacacacacacacacacatatatacaccattttagtatatattttttaggtccctatgccaatcctcaaaaagttatttaacctatacctgaaaagttatacagtattatcaaatattattttctttgtaaatattttctatggaaagttgattaaaatttctaacttgggatactgaaaacccatgttttcttgacatggccagggattcagggagtctacctcttctttgcaccagcatttgggattcctcaaacactcaagaagttgatttggtctcttaagacctggggcaagtcttccaaatgggtaggagggaagaggattgatggaggctggggaacctaggcaccttctgaattgtaaaggggaaaggaaaaatttgaaagggcgaatgggactcatattttgactgtgcgagttgatagagagttactttggagggaggttgaagttaaaaacataaaaaatggaccataccctagtaactagcaattccacttctatttacgtaccctagggagttaattgctcttgtaggcacagaggcataaagtggatggtcactgcagttaaaaatcggaatccttttaaatgccaatcaggaggggaatagccaaatagaatgtgctatgttcatataatagactgtggtccaacagttaaggggaatgaacagtaagatctctgttaatcaccctcagtaactttcagatatgttactgtatcaagaaatctttcgtgttaatagaatggtagatgattggatacatgataaaatgtatatgtgtcatgtacagtgacaccaattgtttaacaatttaagaccctgtattttatttttaaaattttttttcatacatacttccacatcatgtattttctatatgtacatttatgtatgtaaacttaaaaaatattttagaaatgtatcacttaaatttataatggtggtttcctggaggtgggattggaaattattgggattagattttaaaattgatgtgggtctttagctttattttatatagccgcgtgtaacttatataaataaaattttattgaaaaagttaaaactcaggaaagagagagagacggaaaggggtaaggtacgctagatttagctgggagggaacctggcccaaatgtcatttgcttggaagtgcactgtaaaaggatttaggaaagacatctacatattaaaaattgcccaggatttatagatggatttatatatgtaagttgtaggtgcattgtaaaaagaaatacatacattttaaggagtagcatgttttatgtgtaaagttctttctttgccatggaaataaaacaatgagtttaaaaacaatggttctttaagaaacatttatttttaaaattttatttatttatttatttatttttttggagacacagtcttactttgttgcccaggctggagtgcagtggcgcgatcttggttcactgcaacccttgcctcccaggttcaagagagtctcgtgcctcagtttcccaagtagctgggactacaggtgtgcgccacaatgcctagctaatatatgtatttttagtagagatggggtttccccatgttggccaggctggtctggaactcctgacctcaagtgatgcacccatctcagcctcccaaagtggtgggattacaggcgtgagccaccacgcccagcctattttattttttagatacggggtcttgctatattgtccaggctgaagtgcaatggctatacacaggtgtgatcatagcttactgcagcctcatattcttgggcttaagcagtcctcctgcctcagcctcctgactaactgggactatatgctttaccatcacgcctggctcatgggttcttgttttggtagcaggatcctgacatttctaatgccttataattatagctaatagaaataaaaataaggaataaccagaaagaaatataaaggaatcataaagttgagcagataggtgctaagttgatcctgcttacaatatttgagataattcttaaagtcattataccagtcttgatatgaggtcctagtattttatttttatattttaatttaaatttttaaattttttattttttagagacagggtcttgctctgttgctcaggctggagtgcagtggcacgatcgtagctcactgcagccttgaacacccaggctcgagggatcttcctacctgagtctcccgagtagctgggaatacaggcacatgctaccacacccagctaattatttttatttttattttttgtagcaatgaggtctcactatgttgcctaggctggtctcaatcttctggcctcaaggatccaaccaccttggccccccgaagtgctgggattacaggtgtgagccacggtgcccagcctgtattttatatttcttaaacttgttatgtttttaatttaacatttcttctcgctcagtaagcatttatttgaaagaagtagtgtataatttatgaactttacattcctaaggctcttaggaaataaattttatttaaaagttatttgtctgatttgatcctatagtgaatacataaggtatatttctgtgttcttaatatatattattttattcatactagagatctttctgctttcagatcttttttttttttttttttttgaggtggagtctcactccgttgcccaggctggagtgcagtggcgcgatctcggctcactgcagcctccgcctcctgggttcaagcaattcttctgcctcagcctcctgagtagctgggattacgggcgcccaccaccatgcccagctaattttcgtatttttagtagagacggggtttcaccgtgttggtcaggctggcgtcgaactcctgacctcatgatccacccgcctcagcctcccaaagtgttgggattacaggcatgagccaccgcacccggctgccttcagatctttactaaaaaactttttagtaaaataatttagtaaaatatttagtaaaataactttttgtgttatgagtggcatttatcgagtttcagctgtatatcatttatagttgtggcccctgatagatatggagaattttaaattgaaacatagtagttaatcattcaaagctgtaggaaaccagtgtgaggaaataacaggagtttaaacaattttgtagtatgtaatatagcattgtattggtttttcagttttttctgagattgactttataatcagttaaagtgagtaacaactgctattgttgaatgtttggaatattgaatgtgtgaatttgtaaacggttgaacatgttagagtgatcttcataaaactgaatgatttggttatattaagtctttaatgatgaatactttaagttcagttaaaaaaagatgatgatcctggagttctgttttaatgtacaaactgaattgctttatttttagtaaacttttcctttctaaatctatgcaaaggtctgaacacgaaagacattccccaaactgcccatttgtgaaaggtgagcacacacagaatgtgccattgtcagtcactcttgcaacaagtcctgcacagtttccttgtacggatggaactgacagaatatcttgctttgggtcggggagctgccctcattttctagctgctgcaactaaacgaggaaagatctgcatatgggatgtttccaaacttatgaaggtatgtttgaattttgaagtaacaaattagtaattgaaaaaagatcagttgtaaacttaggcttttcatttgtttaggtgcacttaaagtttgaaattaatgcctatgatccagcaattgtacaacagcttattctatcaggagacccaagctcaggagttgattcaaggagaccaactttggcgtggctggaggactcctctagttgctcagatataccaaaattggaaggagatag

SEQ ID NO: 613 - DNA, 516 bp, Homo sapiens
gaagtcgccacctgatagtttaccatccacagtcattcttcaagattcatttacaacagtccagtaaaggggacgaggtcatttgattacctctgtatcttttaagtctctctctctttttttttttttttccaatacagggtcttgctctgtcactcaggctggagtacagtggtgtgattttggcttactgtagccttgccgtcctgggctcaagtgattttcccacctcaaggcttctgagtagctgggatgacaagtgcatgccatcacgcctggctgttattttttagtagagatgagatcttgctatgttgaccaggatggtctcagacgtttaggctcaaacgaacctccatcctcagtctcacaaagtgctaggattataggtatgaaggcactgtgcccaacctcaaatcttttacagtggcattaatctaaaaaatttcttcaggaatgtagcattgctttagtttaatatctttgtagagaaggaaagttctaggggcttatact

SEQ ID NO: 614 - DNA, 13220 bp, Homo sapiens
agatgtcatagacttaaaaaaaggagtggctcattttgaaaggattggaggagtaagttactgaaattgttaagtgcttaataaaatgaatcaagtcttttacatgaatcaccatttttcatagttactctctccatctttatttgcatggataatcactgactgtttttgaagctacatttgtttttgttttggtttattttgtttcgtgtcttccgtagaaatacttgttttctagatgtaattataataagggggataataaaagggtttagatacaagaaatgacaatgatactagtatatcttttaatttcagagttgttttatgtttcgtatttatccagctgtaacaataaagtaggacttgttatatgggcttacgtttttatccatttctccctttctgtctgcaggaatctgttggggatttgatgataaggaatattcagttacatcattcaggaaaatatctctgcacagtacaaacaaccctagaaagtttatctgcagtagccgatatcattgttagaggtaagcataaatggtgaaaaagtgatcacattgtttcttcacagttacagtgttcatatctaaattgtagacctctgagaaaccacaccatgttatggaagtgagatgtaatcagatagagttttattttttaaaccccaggactccatggtatgggtagtgtgaatacagacatggaactgtgtgaatacagacatggaactgtgtaggatttgactatcatgaacggtcacgcttggcaagcggtgtcagtaactaaaacttagacataccttctgtttataataaatcattcttgtcaatccagagtcaaatccacatgctcctgtagttcttcatattagctgcaattacttgagttagattttaagaggaattaaagatgatggttctcaatctttgagtataggttgatatgcaatcatcctatgcctgatattttctaatctccagaggaagcactactacattaatgtcatttaccatgtaaagggaattaatagaactttatcgctaataatgtgctataaatacattatggtcaatattttacttcctaagcacaacaggtaaaaataaaccatcctagtaccaaattaatgaatgtaagtatctccaatggagtcatgataaaacatttttttcaaggtccaccaggtcctcctgaggatgtgcaagtggaagacatttccagtactacttctcaactaagttggagagcaggcccagataataacagtcccattcaaatatttactattcagactcggacaccattttctgtgggttggcaggctgttgctacaggtgagtgacaaaagtgttttgggtcactttaaaaataatattttagtccaataattttaataaatgcaattacattttaaattaataattatataattttgtacaattatttgtttttgagtagtcccaacctaggtgccttagtgtctcattctttttagttccagaaattctcaatggtaagacatacaatgcaacagtggttggtttgagtccttgggtggaatatgaatttcgtgttgttgccggcaacagcattgggattggagaaccaagtgaaccatcagaattgttaagaactaaagcatcaggtaaagaatcaatgtgttctaaaagtgtggaagatttcgtatgatacagttcttaaaacaaaacaagtatttttatgtgtcttctaatacttttggctcaaaattgtttggcagtaaacgagtggctctcattttcttttatttttacatacacaaggcaaggtgtattttctccaaatagtaggttcaataagaaatgattacctttaagccaacatgtcaaaatcagagttcttaggaaactgtgtttgcatcgcatctattttctagtcaaaattcattagagaatctgtagatttgtatatgcaaatgagttactgcttgtttcattaaaatgttgtagccaggaattaactgagactctgttggtgcagtcagccatatattttcatctatttctcaactctgaactagttgtagcttcactgagcagtagtataaatttttttccatgcaaatgaggtaaatcctaagctcatttaacaggggcactaattgagcattaattggttcactgaacagcagaacgcaagaacctggatcagataccatgccttcttaagctcttttcaatggatcctctttgttccactcaaacttttacatccagggtgacatttaatctgctagctgtatatagcccacaaagttcacattcttattcgatcacataaacaaaggatcacttgtcatggctagcttaatttaacaaacacaaattaccttattaaagtgtgcacaattgtcagaagtcaataaatcaatccttaaactaaagataatgttatatgtttatcatagaattggggctagaaaaaggacatacttgacagtgatatcatccaattaaatcacgctagaagcttacagctgagaggaaatccctttgttttacagaagaggaaaatgaacaccaggatattagctggttgtttgtgacagagctaggttttgaatccaaacctcctgatttttacacccagcattctccataaaagaggatcttaatgtagatgagcaatagattagccaaagaaagtgtgtaaatatagaaattccccggccctcctatataccccctggatcagaatcttcaggtgttgtccatgactctggatatgagctttagtttcaggttgtttgtttacagttgatttatattttggtagctttggacagggttgacagaaactcttacattttcatagcaaagtttgtgtgccaccttctaaccattaatactctcttgtttcagtagcagaatgagactggtgatattcatacccactgagtcaaactctactaactgaaaacctactgagtctctcgtctctccctctctgtctctgacatcatcaaagactaacaacttgttctcaatatggttttaggcttaagtacaattaatttaaaattgaatagggaaaggaattttctatttctcagaacattggaaactttgtagaaagtaaatcaaaatataattcaaaatacttttccttacacagctaaactatgcaaagatcctgagatagtgtgcagttagtcactctaagctgtcaagcactataaattcagcaactctgtaaaatccactctgattcacatcgcttttgatcaaaggcattggaagtcttagaaaataaggtttaggttcacataacttctttctaaaaaattatgaagcttaaagctgacaaagttaagggtaaatttaaatacgaaaaggtatatctgaaaggtgcaattttgaaaaagaacaatcagattatcatatgactattttctggtcatgtttatagagctaaacatcagtatgaaatggaaataaataaaataagcaatctagatttatttaggtggtctatatggtggggaaaaatttgaaatgaggaattaaaacttacatattttaatccctgcctaccaatccccagacatatccaagtgcctcctcaaccaaccacctctcctattgttcagacatggtccagtatagacaatttcatgtaattccacatttaaaaagtataccctgctgatttagcgattatcacagatttaggatacttttgtcattacgtcaagaaaaataatgctttgaaacacttacgcatgtgtaaagtaaaacctcatgctcgtgaggcactacaataccatatacacactcagcatttcctcagcctgacagttactatgatctatgattcatcgtgtaagtccttacaaggatacagagttgaagggcatcgtcttataactcatcaaaattactggtttctgaatcctctaccacagagccttagatcccaagaaataaatagaaagaacctctcccagtcgcattcttgacaggagaaaaacctgactttgcaagtgaaaagttagaagaaaatccctcttcttctctcccgagagatttgagattgtaacgaggagttttaaaacaagaatatttatttacatatttttcagtatttaattttaactggtaaaatatcctgatgactaataaaaggaaaaattagtttagtttgtttattgaaaaaaaataattaatatactgcctcagtaacttgtttacagctcaactgtataattaggcactaaatcagcagtgtcactgtcaccatctgaatggaacatcattttgccaattagtagatgatgcataatgatgtcaaatacccgatgttactcaatttttaattaattttggagccagggtgctcatgtatcaaacacaactgtgtcctctctcttagaaatttggatatgtgtaaacataatttacgttcattaaaaatgcaagactctctcacagtatgcctgtgtgagattttgaaaagtgaaattcaaaaacaaaattcttcctgatgaagacgtactttaataattgccatcccacatttctcttggttatttttagtccctgttgtggcaccagtaaacatccatggaggtggaggaagtcggtctgaactcgtcattacgtgggaggtaattttctgtccaactgagttattttgaagaaaagagatttaactggccagaaagaaactgaaaaacaaaaagatttatttgatcactattgagagcgtaaaaaaatatggtataaaaatacatcatcctgatgatgaattatttagaggaggtattaggaacttttctcatggtgagacagtatgacgaactcagcacaattttctcccaaatacacgaaaaacaacttcagtatctattgagcgtgtgtcagtagcattttcgttatcgcttgatgaattaggcattgtttgatttgttacctgtggcactgttgtattgtgaataagttgagcccagtagactgtaggcaaaaaatagttcttgtcctaaccctgctgttcacctctgatcaactcattcttccctgcatctagatgaaagcttaggcacatggagtagattttgtggtcattcttattacccattaacatacaggctcatttttttaccttattaaaaatttcagtctggtgtgtacacttcaaactggagtataaacgttagaatttagactttcaaccaatttaaagtttctcattttcagtatctcagtgcctcagcctaagaattctatagcgtgaaagggaatacgtggtcagttcaacttctctccattctgctctttaatttatctttccccattcacagtgttacctctggattctccagagctgtagaaggttggtgttggtaggggaggagaaaggaaaaggtctggattgctggtacatttctcgtttgactttggtgtgctctagttatggcaaattatcagacgctgccatttcatagggtagggtttctgcgttttttaatttattttttatctgggagatggccactggatgatcccccaccaaggactcccaactgcaattccttggtgcagacccaactggctgctgaagggtatcagttcctggattttggtggtccatttccagactcttccagtgaatattctctctcttgtaggtggtctttgtggatagagtccccttgaaggctgtccatggatgacccacttgcatgggtttcacatttgtcctcagcagacacataccctgctccatgtttagcggaagtgcaatgcatacccacttagcatctctcttcactctgccaccgtgggctgtctggatctcttccccactttaaatttctcagacatttgtcagttaaatgaacctgcgtcccttatgttccaggaaatgcaaaccaggtgtttcttgctgtagcctacttcacatagctaggctatgagagataactgggaaccagagacgttattctttatggttataaatgacagtgtcagaaactagatgcaattgccctgaaagtcaccctttcctctggatatcttgtttcatgtggacattataggcctagcacagtgcttggaaagtggtccaccctccatgaacacttgttgaatggaaggtagtgttttcagagagttggaactctcagaggccagacagagggggaaaccctattttttcaagcatttacaggatttcaggtgccacacagagcatttcatatcattcagtccccacaataatgctataaggtggttataccactttcaagtaagaaaactgagacttagaaaagtgacatcattgggcagagaagcatttgaacacagggttctctctttctgttcttttactgtatcctgtattacaatcccaattgtcttcatgcactgtgatggctgagggtgggcctgagtccttgagtatatctaccttaagtagtaagttaaccatattatacctactactccaaacatatttcccataaaacactgactttcaaatgagtctacaagagaattgtttgtgagtagtttatttaggtttctatattcatcaaaggccaaataagcattatcatcatagtgtacaggaagttttgcctgacttaataacttattttgttctcctccttggtaagaaattcctacaggctgttgttgcaattgcttgtacacagtctataatgagggcccaaatgctatgcattcattcttaaatagagatgagcatgaattaccaaagaatactgtctttccacgatttataatgttcttttttctttaaggcaaaggtacacaaaccatgacctatgagacaaatttgtctagtttcctgttttgataaataaatccacccatagctacatccattaatgtattgatgctttcttgctgttgcatgagaccatatatcccacaatgcttaaaatatttactatctggtagcaacaatagacgctagcgtctgctagagtgacgagaggaagggcgagggttgaaaaactagctatattaatgggtactgtgctcactacctgggtgacgggatccatcataccccaaacctcagcatcacacagtatatccatgcaacaaacttgcacatgtacccccgaatctaaaataaaagttgaattttttttttaagtttactctctggccctctacagaaaaagcatactaacccctatttttaaaaattaaactaaattaaagccacttcctctgtgtttattttttcttcctgaggaggaggtggggggtggatatctgatatgcagatacttgcagaaagtaaattagtgaaatcggtttcccatttatcactcatatttgacattatgtacaagcagatactgagccaacttcttctggtgcccagcttctttatggaataagttatgtatatttaggagaagattcatacattaggatgaatctgagccaccagaatgcaggtagtaattccttcaatttaatgaactctattaggtagcttctctgttcctatcagtggaatacaaaaatggatgagaaaaggtctgaatgctcagaagcgtagaggacagaatggtcttaacccagcctggaaggaggtcaggaaagacaccatcagaactgagtatatctgaactacgttttgaaaagtgacttggaagtagagaggccaccccaggtcaatgtcactcctgttgtagttgaaatagtacctgttggactttgaaaggcactgcgcgacacaagactgttctaagttcagtcacaatctgccattacgtttcataagtgacaactttaatgattatccttcatttaggctccctgtggtataatctgcctgaactgaactaaatatctttcccgtgttttccccagagccacacaataaatgtagattttttgtttatttgttttgatttggtttgtttccaaaaacctagacataatatcaaatttttagaatatagcaatgggtaattcctttttaagggcatgtttatacattattttatcataatgtgtatactcccaaatacttccaggtttgaggtgcttgtggtgaatgtctcataaatattactataaaattaggtacacaggataaagcactatagagtaagagatacatacctacactgagggttggcacgctttttatttaaagggccagacagtaaaaatattcagtctcgtgggccacatgacctcttttctaatgtctcagtctgcttttgtagctcaaaagagccacataccacttacaaacatataggtgtgggtgtgtctcaaaacctttattttcaaaaccaggctgcatgccagatgtggctagaagtacatagttttgctgattcttagtctgtactaaagatttggttcttacagacactgtggttgagaattacattattagtttatcaattttcatagattttactcccaggagaatttcacaatttctttattttactgaacactgtctccacttaaagaaaactctttttctggccttgttaaataactatatatattttttaatcatttgactctctgttgatgtaagaataaagggaagtatctaaataagtctcttttttcccctctaatctgcatatgttggactcaggtctttcttgagagagcaccatgagaaacactaattgtacttgactaacaaaaacaaaactcccctatttatgtagatgaactgactaagcatcgtgattaaatccgagatgaaagaaacttcagaaatgaatcaaatgctctagcaagtagcatcgattcttataaatctcttccatgccattcaaaattaactggtttacttctagtctccctatgaaaaagaagagaagtgttaatatgaggaaatactttgttgtttccccagatgtccggagcagcacttttcttcctcttttcactttctgtatttgttagactgttccacatggcaagaaatagagaccagctcaggtcatctcgggtaatgggggtttattttaaagctacatgggaagtaatgaggacaggaaaaaagtctcagcaagcaggcaggaaggtcagatgaagaaccggaacatggttcatcactgctctgggcactcgggcacaggagctctaggcaaccatcaacaacccctctgctgatccagccccggcttgaatagtctctcatgcttatgcctcagttcctcccatttcctttacttccagttttctacctggctgccagctaatttggatgccctctctctaatttacagcatctgttttctcttagcttctattgcctcactgttcctgctactccatgttctctactttttgcctgctctgtgtatatctatcattgttttgccacccaccatgtttcatatgcaaactctgtgagaggaattgaccaggtctgttagtcaccgtagagtacagagattctgccctcatagatactcaccaagacggtgcctgtggttctggcgctcgtgaattggtgctcgcatgggttccaagtggcaagatagatagtgtgattgatagaataaatggactcccatgaataaagagaacctctgaaatggagttgtggacatgagggactagaagcactgtgtcctgtcaggtgttgcctttattagtctgtcagaatatttattaaaaaaaaaaaagcaaagcattttccttgggaaaaaccaaataaattccattgatttttcaatacaagtttcttgccatcaggagatatgttggtctaaattcaagtacagattcattttaatttgctaagtttatgtgattgtttacaatttttagtatctgcagagtacagggggaatattaccaatttctattttgctattttagtaattttagatttgaaatgtattttatagaatctgatctttgtgagagttaacagtttattctttcatgtgaggaaaaatgcacacatgtcactaccaatgaagatgtatgcctaaaaaaatgatgggaggtcttttatacttttttaaagaaatattctgtgtcttaaagcatatgttatttcacagtaattccattacacatgtcttacaaaaacttgtttaaaatgttgtgaaaggaaaacatatctagtcttgaaataaatagttaagaagttaatttgtgctgagtttaaaaattcatatcaaaccacatttgagtgtgtatcataaaatcttttaaactgttttattattataatttatgaatgatcaaagaaaaatatataaatatgtaaagcttgttttatatttctatctgaaaacttaaactatttatctgagtatctttaactgggatcatttttctaattggcattccaaataaaagtgttttttaatacatcattaaacagaataaatatccatatttgtctctatggaagaaatgtgaaataatcaataaacattatagtagcttaataaaatatttttgcaaatactcagtgattgatcacattctgcccaagtcaattccagaagaactgcagaatggggagggatttggatatatcatcatgttccggccagtgggctcgacaacctggtccaaggagaaagtgtcatctgtggaatcatcaaggtttgtctacagaaatgaaagcatcatcccactgtctccctttgaagtcaaagtgggtgtgtataataatgaaggagaaggatccctgagtactgtgaccattgtctactctggggaagatggtaagttgtcctcaactctggttttctttgagactctatgcatagtttgtgttcccttgttccattttcaatgaaccactctgctaaagatggttatgtctttctctggatggtagaacctcaactggccccaaggggaacttctctccagagtttttctgcttctgaaatggaggtttcatggaatgctattgcctggaatagaaacactggaagagtgctgggctatgaggtaatccacattaatttcacttttgcttatgaatgtgccaatggacttcgcaatagctcctattcaacagtcctatcctactagcctgttgttagcatatgataatgtgtgtctaaagctaaagcagagaatgaagttgagacagggtaggtgagcccccacattgagaggcttagcctgggatgtttcttgtcctcgctcaagacagaattcgagagtgagccagtggtaaaaaaacaaaaacaaaaacaaaaacaaaaaaaaacagctttattgaggcagcagtgttacagttttgaaattgcttctgcagagcagggctaccccataggcagtgtgctaagagcagcagcttggaagcagttctacactcatatttatacccacttctaattacatgcaaattaatgggtgagttagttattcagaaatttctagaaaaagggtggtaacctccaggccattgccatagaaagggatggtaacttccaggtgttgccatggcagtggtaaactgatacggaactggtggttgtgtcttatggagaggtgctttagcctcttccctgtttcagtcagtcttcaatctggtccacagtaaagtcctgcctcctccctcaaagtaagggaaatctttctaggtaattcaaagcaaacaaattaacacatagtagccatttttaaaggcatacagattcagtaagtaagatgagtaagctctaaagatctgctgtacaactgtgcacacagagtcaacaattatgcattgtacccttaaaatttttcaagaggacagatctcatattaagtgttcttaccacaacatcatttttcaaaagtgatcaggtgattatatgattaattattcaaattgcagtcatttttttttcccttggtaagaggtgaagtctgctcctcaatcatcttacaccatggaagaatttcattgagaaacctgctttgtgaattgcagtataacttggaaagatgtaatcatctcagaaaaggcagttaagtaatgaaaaaaaatacctagattgtcttgaatctgctatttttagtctatgaagaataaggcaaattacatttgtaggccttcatctcacaaagtaaagagacaagaacattttaagggaaagttgttcatcactcaatctttttcaacttgcaaattcagtgattcacaaaatgggtaacataatttatttaactttggatttagaataaatgtataatcctaaacattcttaattttgcctatatatatatatatatatatacacacacacacacgtatacatatacatactatatatacacacatatatatacatatatacacatatatatacatatatatacacatatatatatatatatatatatatacacacacacacacacatatatatatatatatataaccataatcctctgattccaacagaaagttctactctcaggacaggtgtcttttccactccatgccaagaatgccttacctcttatctgaaccctagttacttctcaaatttcatccctagtcgcctcttctctctgagctctactcccatcaattcctgatgtattttgtcaaattcttgtagcatattttttctataccacttctttgcaatgcattctgtgacttattttcacatacactgtggattctaacctcttagctagatgataaggggcttgaaaataggtacttaatttattctctttttttttcaatgtacctaaaacaatgctaatgcaaaggtagggttcagtataaattgaattattaattaacctgtgattcaaataactctgaaaagaaatgccaatagcaagacattataatgaaagtctttgactgattatatacaaatgtgtttttgtctgacttgttatacatcatttgctaaagctggtaacctttagatagctcataaaatactttattttggtaatctaaaaaatcacgttctctaatttccattgtgaatttgcattcatgacttttttcctcataaatattagagaataacaattttgttgttgtataaccattttaattagaaaacgtttttgtcatctatacttctgtcttcttcccatattccttgtggttgtggttgatagttgttggtaaaaaatgattgatagttattggggaacaataaattgcttgttttggtttttaattatcaggtcttatactggacagatgactccaaagaatcc

SEQ ID NO: 615 - DNA, 10957 bp, Homo sapiens
agatgtcatagacttaaaaaaaggagtggctcattttgaaaggattggaggagtaagttactgaaattgttaagtgcttaataaaatgaatcaagtcttttacatgaatcaccatttttcatagttactctctccatctttatttgcatggataatcactgactgtttttgaagctacatttgtttttgttttggtttattttgtttcgtgtcttccgtagaaatacttgttttctagatgtaattataataagggggataataaaagggtttagatacaagaaatgacaatgatactagtatatcttttaatttcagagttgttttatgtttcgtatttatccagctgtaacaataaagtaggacttgttatatgggcttacgtttttatccatttctccctttctgtctgcaggaatctgttggggatttgatgataaggaatattcagttacatcattcaggaaaatatctctgcacagtacaaacaaccctagaaagtttatctgcagtagccgatatcattgttagaggtaagcataaatggtgaaaaagtgatcacattgtttcttcacagttacagtgttcatatctaaattgtagacctctgagaaaccacaccatgttatggaagtgagatgtaatcagatagagttttattttttaaaccccaggactccatggtatgggtagtgtgaatacagacatggaactgtgtgaatacagacatggaactgtgtaggatttgactatcatgaacggtcacgcttggcaagcggtgtcagtaactaaaacttagacataccttctgtttataataaatcattcttgtcaatccagagtcaaatccacatgctcctgtagttcttcatattagctgcaattacttgagttagattttaagaggaattaaagatgatggttctcaatctttgagtataggttgatatgcaatcatcctatgcctgatattttctaatctccagaggaagcactactacattaatgtcatttaccatgtaaagggaattaatagaactttatcgctaataatgtgctataaatacattatggtcaatattttacttcctaagcacaacaggtaaaaataaaccatcctagtaccaaattaatgaatgtaagtatctccaatggagtcatgataaaacatttttttcaaggtccaccaggtcctcctgaggatgtgcaagtggaagacatttccagtactacttctcaactaagttggagagcaggcccagataataacagtcccattcaaatatttactattcagactcggacaccattttctgtgggttggcaggctgttgctacaggtgagtgacaaaagtgttttgggtcactttaaaaataatattttagtccaataattttaataaatgcaattacattttaaattaataattatataattttgtacaattatttgtttttgagtagtcccaacctaggtgccttagtgtctcattctttttagttccagaaattctcaatggtaagacatacaatgcaacagtggttggtttgagtccttgggtggaatatgaatttcgtgttgttgccggcaacagcattgggattggagaaccaagtgaaccatcagaattgttaagaactaaagcatcaggtaaagaatcaatgtgttctaaaagtgtggaagatttcgtatgatacagttcttaaaacaaaacaagtatttttatgtgtcttctaatacttttggctcaaaattgtttggcagtaaacgagtggctctcattttcttttatttttacatacacaaggcaaggtgtattttctccaaatagtaggttcaataagaaatgattacctttaagccaacatgtcaaaatcagagttcttaggaaactgtgtttgcatcgcatctattttctagtcaaaattcattagagaatctgtagatttgtatatgcaaatgagttactgcttgtttcattaaaatgttgtagccaggaattaactgagactctgttggtgcagtcagccatatattttcatctatttctcaactctgaactagttgtagcttcactgagcagtagtataaatttttttccatgcaaatgaggtaaatcctaagctcatttaacaggggcactaattgagcattaattggttcactgaacagcagaacgcaagaacctggatcagataccatgccttcttaagctcttttcaatggatcctctttgttccactcaaacttttacatccagggtgacatttaatctgctagctgtatatagcccacaaagttcacattcttattcgatcacataaacaaaggatcacttgtcatggctagcttaatttaacaaacacaaattaccttattaaagtgtgcacaattgtcagaagtcaataaatcaatccttaaactaaagataatgttatatgtttatcatagaattggggctagaaaaaggacatacttgacagtgatatcatccaattaaatcacgctagaagcttacagctgagaggaaatccctttgttttacagaagaggaaaatgaacaccaggatattagctggttgtttgtgacagagctaggttttgaatccaaacctcctgatttttacacccagcattctccataaaagaggatcttaatgtagatgagcaatagattagccaaagaaagtgtgtaaatatagaaattccccggccctcctatataccccctggatcagaatcttcaggtgttgtccatgactctggatatgagctttagtttcaggttgtttgtttacagttgatttatattttggtagctttggacagggttgacagaaactcttacattttcatagcaaagtttgtgtgccaccttctaaccattaatactctcttgtttcagtagcagaatgagactggtgatattcatacccactgagtcaaactctactaactgaaaacctactgagtctctcgtctctccctctctgtctctgacatcatcaaagactaacaacttgttctcaatatggttttaggcttaagtacaattaatttaaaattgaatagggaaaggaattttctatttctcagaacattggaaactttgtagaaagtaaatcaaaatataattcaaaatacttttccttacacagctaaactatgcaaagatcctgagatagtgtgcagttagtcactctaagctgtcaagcactataaattcagcaactctgtaaaatccactctgattcacatcgcttttgatcaaaggcattggaagtcttagaaaataaggtttaggttcacataacttctttctaaaaaattatgaagcttaaagctgacaaagttaagggtaaatttaaatacgaaaaggtatatctgaaaggtgcaattttgaaaaagaacaatcagattatcatatgactattttctggtcatgtttatagagctaaacatcagtatgaaatggaaataaataaaataagcaatctagatttatttaggtggtctatatggtggggaaaaatttgaaatgaggaattaaaacttacatattttaatccctgcctaccaatccccagacatatccaagtgcctcctcaaccaaccacctctcctattgttcagacatggtccagtatagacaatttcatgtaattccacatttaaaaagtataccctgctgatttagcgattatcacagatttaggatacttttgtcattacgtcaagaaaaataatgcttttaaacacttacgcatgtgtaaagtaaaacctcattctcgtgaggcactacaataccatatacacactcagcatttcctcagttttacagtttctatgatctattattcattgtgttagtccttacaaggatacagagttgaagggcatagttttttaaaactcatcaaaattactggtttctgaatcctctaccacagagccttagatcccaagaaataaatagaaagaacctctcccagtcgcattcttgacaggagaaaaacctgactttgcaagtgaaaagttagaagaaaatccctcttcttctctcccgagagatttgagattgtaacgaggagttttaaaacaagaatatttatttacatatttttcagtatttaattttaactggtaaaatatcctgatgactaataaaaggaaaaattagtttagtttgtttattgaaaaaaaataattaatatactgcctcagtaacttgtttacagctcaactgtataattaggcactaaatcagcagtgtcactgtcaccatctgaatggaacatcattttgccaattagtagatgatgcataatgatgtcaaatacccgatgttactcaatttttaattaattttggagccagggtgctcatgtatcaaacacaactgtgtcctctctcttagaaatttggatatgtgtaaacataatttacgttcattaaaaatgcaagactctctcacagtatgcctgtgtgagattttgaaaagtgaaattcaaaaacaaaattcttcctgatgaagacgtactttaataattgccatcccacatttctcttggttatttttagtccctgttgtggcaccagtaaacatccatggaggtggaggaagtcggtctgaactcgtcattacgtgggaggtaattttctgtccaactgagttattttgaagaaaagagatttaactggccagaaagaaactgaaaaacaaaaagatttatttgatcactattgagagcgtaaaaaaatatggtataaaaatacatcatcctgatgatgaattatttagaggaggtattaggaacttttctcatggtgagacagtatgacgaactcagcacaattttctcccaaatacacgaaaaacaacttcagtatctattgagcgtgtgtcagtagcattttcgttatcgcttgatgaattaggcattgtttgatttgttacctgtggcactgttgtattgtgaataagttgagcccagtagactgtaggcaaaaaatagttcttgtcctaaccctgctgttcacctctgatcaactcattcttccctgcatctagatgaaagcttaggcacatggagtagattttgtggtcattcttattacccattaacatacaggctcatttttttaccttattaaaaatttcagtctggtgtgtacacttcaaactggagtataaacgttagaatttagactttcaaccaatttaaagtttctcattttcagtatctcagtgcctcagcctaagaattctatagcgtgaaagggaatacgtggtcagttcaacttctctccattctgctctttaatttatctttccccattcacagtgttacctctggattctccagagctgtagaaggttggtgttggtaggggaggagaaaggaaaaggtctggattgctggtacatttctcgtttgactttggtgtgctctagttatggcaaattatcagacgctgccatttcatagggtagggtttctgcgttttttaatttattttttatctgggagatggccactggatgatcccccaccaaggactcccaactgcaattccttggtgcagacccaactggctgctgaagggtatcagttcctggattttggtggtccatttccagactcttccagtgaatattctctctcttgtaggtggtctttgtggatagagtccccttgaaggctgtccatggatgacccacttgcatgggtttcacatttgtcctcagcagacacataccctgctccatgtttagcggaagtgcaatgcatacccacttagcatctctcttcactctgccaccgtgggctgtctggatctcttccccactttaaatttctcagacatttgtcagttaaatgaacctgcgtcccttatgttccaggaaatgcaaaccaggtgtttcttgctgtagcctacttcacatagctaggctatgagagataactgggaaccagagacgttattctttatggttataaatgacagtgtcagaaactagatgcaattgccctgaaagtcaccctttcctctggatatcttgtttcatgtggacattataggcctagcacagtgcttggaaagtggtccaccctccatgaacacttgttgaatggaaggtagtgttttcagagagttggaactctcagaggccagacagagggggaaaccctattttttcaagcatttacaggatttcaggtgccacacagagcatttcatatcattcagtccccacaataatgctataaggtggttataccactttcaagtaagaaaactgagacttagaaaagtgacatcattgggcagagaagcatttgaacacagggttctctctttctgttcttttactgtatcctgtattacaatcccaattgtcttcatgcactgtgatggctgagggtgggcctgagtccttgagtatatctaccttaagtagtaagttaaccatattatacctactactccaaacatatttcccataaaacactgactttcaaatgagtctacaagagaattgtttgtgagtagtttatttaggtttctatattcatcaaaggccaaataagcattatcatcatagtgtacaggaagttttgcctgacttaataacttattttgttctcctccttggtaagaaattcctacaggctgttgttgcaattgcttgtacacagtctataatgagggcccaaatgctatgcattcattcttaaatagagatgagcatgaattaccaaagaatactgtctttccacgatttataatgttcttttttctttaaggcaaaggtacacaaaccatgacctatgagacaaatttgtctagtttcctgttttgataaataaatccacccatagctacatccattaatgtattgatgctttcttgctgttgcatgagaccatatatcccacaatgcttaaaatatttactatctggtagcaacaatagacgctagcgtctgctagagtgacgagaggaagggcgagggttgaaaaactagctatattaatgggtactgtgctcactacctgggtgacgggatccatcataccccaaacctcagcatcacacagtatatccatgcaacaaacttgcacatgtacccccgaatctaaaataaaagttgaattttttttttaagtttactctctggccctctacagaaaaagcatactaacccctatttttaaaaattaaactaaattaaagccacttcctctgtgtttattttttcttcctgaggaggaggtggggggtggatatctgatatgcagatacttgcagaaagtaaattagtgaaatcggtttcccatttatcactcatatttgacattatgtacaagcagatactgagccaacttcttctggtgcccagcttctttatggaataagttatgtatatttaggagaagattcatacattaggatgaatctgagccaccagaatgcaggtagtaattccttcaatttaatgaactctattaggtagcttctctgttcctatcagtggaatacaaaaatggatgagaaaaggtctgaatgctcagaagcgtagaggacagaatggtcttaacccagcctggaaggaggtcaggaaagacaccatcagaactgagtatatctgaactacgttttgaaaagtgacttggaagtagagaggccaccccaggtcaatgtcactcctgttgtagttgaaatagtacctgttggactttgaaaggcactgcgcgacacaagactgttctaagttcagtcacaatctgccattacgtttcataagtgacaactttaatgattatccttcatttaggctccctgtggtataatctgcctgaactgaactaaatatctttcccgtgttttccccagagccacacaataaatgtagattttttgtttatttgttttgatttggtttgtttccaaaaacctagacataatatcaaatttttagaatatagcaatgggtaattcctttttaagggcatgtttatacattattttatcataatgtgtatactcccaaatacttccaggtttgaggtgcttgtggtgaatgtctcataaatattactataaaattaggtacacaggataaagcactatagagtaagagatacatacctacactgagggttggcacgctttttatttaaagggccagacagtaaaaatattcagtctcgtgggccacatgacctcttttctaatgtctcagtctgcttttgtagctcaaaagagccacataccacttacaaacatataggtgtgggtgtgtctcaaaacctttattttcaaaaccaggctgcatgccagatgtggctagaagtacatagttttgctgattcttagtctgtactaaagatttggttcttacagacactgtggttgagaattacattattagtttatcaattttcatagattttactcccaggagaatttcacaatttctttattttactgaacactgtctccacttaaagaaaactctttttctggccttgttaaataactatatatattttttaatcatttgactctctgttgatgtaagaataaagggaagtatctaaataagtctcttttttcccctctaatctgcatatgttggactcaggtctttcttgagagagcaccatgagaaacactaattgtacttgactaacaaaaacaaaactcccctatttatgtagatgaactgactaagcatcgtgattaaatccgagatgaaagaaacttcagaaatgaatcaaatgctctagcaagtagcatcgattcttataaatctcttccatgccattcaaaattaactggtttacttctagtctccctatgaaaaagaagagaagtgttaatatgaggaaatactttgttgtttccccagatgtccggagcagcacttttcttcctcttttcactttctgtatttgttagactgttccacatggcaagaaatagagaccagctcaggtcatctcgggtaatgggggtttattttaaagctacatgggaagtaatgaggacaggaaaaaagtctcagcaagcaggcaggaaggtcagatgaagaaccggaacatggttcatcactgctctgggcactcgggcacaggagctctaggcaaccatcaacaacccctctgctgatccagccccggcttgaatagtctctcatgcttatgcctcagttcctcccatttcctttacttccagttttctacctggctgccagctaatttggatgccctctctctaatttacagcatctgttttctcttagcttctattgcctcactgttcctgctactccatgttctctactttttgcctgctctgtgtatatctatcattgttttgccacccaccatgtttcatatgcaaactctgtgagaggaattgaccaggtctgttagtcaccgtagagtacagagattctgccctcatagatactcaccaagacggtgcctgtggttctggcgctcgtgaattggtgctcgcatgggttccaagtggcaagtagatagtgtgattgatagaataaatggactcccatgaataaagagaacctctgaaatggagttgtggacatgagggactagaagcactgtgtcctgtcaggtgttgcctttattagtctgtcagaatatttattaaaaaaaaaaaagcaaagcattttccttgggaaaaaccaaataaattccattgatttttcaatacaagtttcttgccatcaggagatatgttggtctaaattcaagtacagattcattttaatttgctaagtttatgtgattgtttacaatttttagtatctgcagagtacagggggaatattaccaatttctattttgctattttagtaattttagatttgaaatgtattttatagaatctgatctttgtgagagttaacagtttattctttcatgtgaggaaaaatgcacacatgtcactaccaatgaagatgtatgcctaaaaaaatgatgggaggtcttttatacttttttaaagaaatattctgtgtcttaaagcatatgttatttcacagtaattccattacacatgtcttacaaaaacttgtttaaaatgttgtgaaaggaaaacatatctagtcttgaaataaatagttaagaagttaatttgtgctgagtttaaaaattcatatcaaaccacatttgagtgtgtatcataaaatcttttaaactgttttattattataatttatgaatgatcaaagaaaaatatataaatatgtaaagcttgttttatatttctatctgaaaacttaaactatttatctgagtatctttaactgggatcatttttctaattggcattccaaataaaagtgttttttaatacatcattaaacagaataaatatccatatttgtctctatggaagaaatgtgaaataatcaataaacattatagtagcttaataaaatatttttgcaaatactcagtgattgatcacattctgcccaagtcaattccagaagaactgcagaatggggagggatttggatatatcatcatgttccggccagtgggctcgacaacctggtccaaggagaaagtgtcatctgtggaatcatcaaggtttgtctacagaaatgaaagcatcatcccactgtctccctttgaagtcaaagtgggtgtgtataataatgaaggagaaggatccctgagtactgtgaccattgtctactctggggaagatggtaagttgtcctcaactctggttttctttgagactctatgcatagtttgtgttcccttgttccattttcaatgaaccactctgctaaagatggttatgtctttctctggatggtagaacctcaactggccccaaggggaacttctctccagagtttttctgcttctgaaatggaggtttcatggaatgctattgcctggaata

SEQ ID NO: 616 - DNA, 13217 bp, Homo sapiens
agatgtcatagacttaaaaaaaggagtggctcattttgaaaggattggaggagtaagttactgaaattgttaagtgcttaataaaatgaatcaagtcttttacatgaatcaccatttttcatagttactctctccatctttatttgcatggataatcactgactgtttttgaagctacatttgtttttgttttggtttattttgtttcgtgtcttccgtagaaatacttgttttctagatgtaattataataagggggataataaaagggtttagatacaagaaatgacaatgatactagtatatcttttaatttcagagttgttttatgtttcgtatttatccagctgtaacaataaagtaggacttgttatatgggcttacgtttttatccatttctccctttctgtctgcaggaatctgttggggatttgatgataaggaatattcagttacatcattcaggaaaatatctctgcacagtacaaacaaccctagaaagtttatctgcagtagccgatatcattgttagaggtaagcataaatggtgaaaaagtgatcacattgtttcttcacagttacagtgttcatatctaaattgtagacctctgagaaaccacaccatgttatggaagtgagatgtaatcagatagagttttattttttaaaccccaggactccatggtatgggtagtgtgaatacagacatggaactgtgtgaatacagacatggaactgtgtaggatttgactatcatgaacggtcacgcttggcaagcggtgtcagtaactaaaacttagacataccttctgtttataataaatcattcttgtcaatccagagtcaaatccacatgctcctgtagttcttcatattagctgcaattacttgagttagattttaagaggaattaaagatgatggttctcaatctttgagtataggttgatatgcaatcatcctatgcctgatattttctaatctccagaggaagcactactacattaatgtcatttaccatgtaaagggaattaatagaactttatcgctaataatgtgctataaatacattatggtcaatattttacttcctaagcacaacaggtaaaaataaaccatcctagtaccaaattaatgaatgtaagtatctccaatggagtcatgataaaacatttttttcaaggtccaccaggtcctcctgaggatgtgcaagtggaagacatttccagtactacttctcaactaagttggagagcaggcccagataataacagtcccattcaaatatttactattcagactcggacaccattttctgtgggttggcaggctgttgctacaggtgagtgacaaaagtgttttgggtcactttaaaaataatattttagtccaataattttaataaatgcaattacattttaaattaataattatataattttgtacaattatttgtttttgagtagtcccaacctaggtgccttagtgtctcattctttttagttccagaaattctcaatggtaagacatacaatgcaacagtggttggtttgagtccttgggtggaatatgaatttcgtgttgttgccggcaacagcattgggattggagaaccaagtgaaccatcagaattgttaagaactaaagcatcaggtaaagaatcaatgtgttctaaaagtgtggaagatttcgtatgatacagttcttaaaacaaaacaagtatttttatgtgtcttctaatacttttggctcaaaattgtttggcagtaaacgagtggctctcattttcttttatttttacatacacaaggcaaggtgtattttctccaaatagtaggttcaataagaaatgattacctttaagccaacatgtcaaaatcagagttcttaggaaactgtgtttgcatcgcatctattttctagtcaaaattcattagagaatctgtagatttgtatatgcaaatgagttactgcttgtttcattaaaatgttgtagccaggaattaactgagactctgttggtgcagtcagccatatattttcatctatttctcaactctgaactagttgtagcttcactgagcagtagtataaatttttttccatgcaaatgaggtaaatcctaagctcatttaacaggggcactaattgagcattaattggttcactgaacagcagaacgcaagaacctggatcagataccatgccttcttaagctcttttcaatggatcctctttgttccactcaaacttttacatccagggtgacatttaatctgctagctgtatatagcccacaaagttcacattcttattcgatcacataaacaaaggatcacttgtcatggctagcttaatttaacaaacacaaattaccttattaaagtgtgcacaattgtcagaagtcaataaatcaatccttaaactaaagataatgttatatgtttatcatagaattggggctagaaaaaggacatacttgacagtgatatcatccaattaaatcacgctagaagcttacagctgagaggaaatccctttgttttacagaagaggaaaatgaacaccaggatattagctggttgtttgtgacagagctaggttttgaatccaaacctcctgatttttacacccagcattctccataaaagaggatcttaatgtagatgagcaatagattagccaaagaaagtgtgtaaatatagaaattccccggccctcctatataccccctggatcagaatcttcaggtgttgtccatgactctggatatgagctttagtttcaggttgtttgtttacagttgatttatattttggtagctttggacagggttgacagaaactcttacattttcatagcaaagtttgtgtgccaccttctaaccattaatactctcttgtttcagtagcagaatgagactggtgatattcatacccactgagtcaaactctactaactgaaaacctactgagtctctcgtctctccctctctgtctctgacatcatcaaagactaacaacttgttctcaatatggttttaggcttaagtacaattaatttaaaattgaatagggaaaggaattttctatttctcagaacattggaaactttgtagaaagtaaatcaaaatataattcaaaatacttttccttacacagctaaactatgcaaagatcctgagatagtgtgcagttagtcactctaagctgtcaagcactataaattcagcaactctgtaaaatccactctgattcacatcgcttttgatcaaaggcattggaagtcttagaaaataaggtttaggttcacataacttctttctaaaaaattatgaagcttaaagctgacaaagttaagggtaaatttaaatacgaaaaggtatatctgaaaggtgcaattttgaaaaagaacaatcagattatcatatgactattttctggtcatgtttatagagctaaacatcagtatgaaatggaaataaataaaataagcaatctagatttatttaggtggtctatatggtggggaaaaatttgaaatgaggaattaaaacttacatattttaatccctgcctaccaatccccagacatatccaagtgcctcctcaaccaaccacctctcctattgttcagacatggtccagtatagacaatttcatgtaattccacatttaaaaagtataccctgctgatttagcgattatcacagatttaggatacttttgtcattacgtcaagaaaaataatgcttttaaacacttacgcatgtgtaaagtaaaacctcattctcgtgaggcactacaataccatatacacactcagcatttcctcagttttacagtttctatgaactattattcattgtgttagtccttacaaggatacagagttgaagggcatagatgtttaaaactcatcaaaattactggtttgtgaatcctctaccacagagccttacatcccaacaaataaatagaaagaacctatcccaggcgcattcttgacaggagaaaaacctgactttgcaagtgaaaagttagaagaaaatccctcttcttctctcccgagagatttgagattgtaacgaggagttgtaaaacaagagtatttatttacatatttttcagtatttaattttaactggtcaaatatcctgatgactaataaaaggaaaaattagtttagtttgtttattgaaaaaaaataattaatatactgcctcagtaacttgtttacagctcaactgtataattaggcactaaatcagcagtgtcactgtcaccatctgaatggaacatcattttgccaattagtagatgatgcataatgatgtcaaatacccgatgttactcaatttttaattaattttggagccagggtgctcatgtatcaaacacaactgtgtcctctctcttagaaatttggatatgtgtaaacataatttacgttcattaaaaatgcaagactctctcacagtatgcctgtgtgagattttgaaaagtgaaattcaaaaacaaaattcttcctgatgaagacgtactttaataattgccatcccacatttctcttggttatttttagtccctgttgtggcaccagtaaacatccatggaggtggaggaagtcggtctgaactcgtcattacgtgggaggtaattttctgtccaactgagttattttgaagaaaagagatttaactggccagaaagaaactgaaaaacaaaaagatttatttgatcactattgagagcgtaaaaaaatatggtataaaaatacatcatcctgatgatgaattatttagaggaggtattaggaacttttctcatggtgagacagtatgacgaactcagcacaattttctcccaaatacatgaaaaacaacttcagtatctattgagcgtgggtcagtagcattttcgttatcgcttgatgaattaggcattgtttgatttgttacctgtggcactgttgtattgtgaataagttgagcccagtagactgtaggcaaaaaatagttcttgtcctaaccctgctgttcacctctgatcaactcattcttccctgcatctagatgaaagcttaggcacatggagtagattttgtggtcattcttattacccattaacatacaggctcatttttttacgttattaaaaatttcagtctggtgtgtacacttcaaactggagtataaacgttagaatttagactttcaaccaatttaaagtttctcattttcagtatctcagtgcctcagcctaagaattctatagcgtgaaagggaatacgtggtcagttcaacttctctccattctgctctttaatttatctttccccattcacagtgttacctctggattctccagagctgtagaaggttggtgttggtaggggaggagaaaggaaaaggtctggattgctggtacatttctcgtttgactttggtgtgctctaggtatggcaaattatcagacgctgccatttcatagggtagggtttctgggtttttttatttattttttatctgggagatggccactggatgatcccccaccaaggactcccaactgcaattccttggtgcagacccaactggctgctgaagggtatcagttcctggattttggtggtccatttccagactcttccagtgaatattctctctcttgtaggtggtctttgtggatagagtccccttgaaggctgtccatggatgacccacttgcatgggtttcacatttgtcctcagcagacacataccctgctccatgtttagcggaagtgcaatgcatacccacttagcatctctcttcactctgccaccgtgggctgtctggatctcttccccactttaaatttctcagacatttgtcagttaaatgaacctgcgtcccttatgttccaggaaatgcaaaccaggtgtttcttgctgtagcctacttcacatagctaggctatgagagataactgggaaccagagacgttattctttatggttataaatgacagtgtcagaaactagatgcaattgccctgaaagtcaccctttcctctggatatcttgtttcatgtggacattataggcctagcacagtgcttggaaagtggtccaccctccatgaacacttgttgaatggaaggtagtgttttcagagagttggaactctcagaggccagacagagggggaaaccctattttttcaagcatttacaggatttcaggtgccacacagagcatttcatatcattcagtccccacaataatgctataaggtggttataccactttcaagtaagaaaactgagacttagaaaagtgacatcattgggcagagaagcatttgaacacagggttctctctttctgttcttttactgtatcctgtattacaatcccaattgtcttcatgcattgtgatggctgagggtgggcctgagtccttgagtatatctaccttaagtagtaagttaaccatattatacctactactccaaacatatttcccataaaacactgactttcaaatgagtctacaagagaattgtttgtgagtagtttatttaggtttctatattcatcaaaggccaaataagcattatcatcatagtgtacaggaagttttgcctgacttaataacttattttgttctcctccttggtcagaaattcctacaggctgttgttgcaattgcttgtacacagtctataatgagggcccaaatgctatgcattcattcttaaatagagatgagcatgaattaccaaaagaatactgtctttccacgatttataatgttcttttttctttaaggcaaaggtacacaaaccatgacctatgagacaaatttgtctagtttcctgttttgataaataaatccacccatagctacatccattaatgtattgatgctttcttgctgttgcatgagaccatatatcccacaatgcttaaaatatttactatctggtagcaacaatagacgctagggtctgctagagtgacgagaggaagggcgagggttgaaaaactagctatattaatgggtactgtgctcactacctgggtgacgggatccatcataccccaaacctcagcatcacacagtatatccatgcaacaaacttgcacatgtacccccgaatctaaaataaaagttgaattttttttttaagtttactctctggccctctacagaaaaagcatactaacccctatttttaaaaattaaactaaattaaagccacttcctctgtgtttattttttcttcctgaggaggaggtggggggtggatatctgatatgcagatacttgcagaaagtaaattagtgaaatcggtttcccatttatcactcatatttgacattatgtacaagcagatactgagccaacttcttctggtgcccagcttctttatggaataagttatgtatatttaggagaagattcatacattaggatgaatctgagccaccagaatgcaggtagtaattccttcaatttaatgaactctattaggtagcttctctgttcctatcagtggaatacaaaaatggatgagaaaaggtatgaatgctcagaagcgtagaggacagaatggtcttaacccagcctggaaggaggtcaggaaagacaccatcagaactgagtatatctgaactacgttttgaaaagtgacttggaagtagagaggccaccccaggtcaatgtcactcctgttgtagttgaaatagtacctgttggactttgaaaggcactgcgcgacacaagactgttctaagttcagtcacaatctaccattacgtttcataagtgacaactttaatgattatccttcatttaggctccctgtggtataatctgcctgaactgaactaaatatctttcccgtgttttccccagagccacacaataaatgtagattttttgtttatttgttttgatttggtttgtttccaaaaacctagacataatatcaaatttttagaatatagcaatgggtaattcctttttaagggcatgtttatacattattttatcataatgtgtatactcccaaatacttccaggtttgaggtgcttgtggtgaatgtctcataaatattactataaaattaggtacacaggataaagcactatagagtaagagatacatacctacactgagggttggcacgctttttatttaaagggccagacagtaaaaatattcagtctcgtgggccacatgacctcttttctaatgtctcagtctgcttttgtagctcaaaagagccacataccacttacaaacatataggtgtgggtgtgtctcaaaacctttattttcaaaaccaggctgcatgccagatgtggctagaagtacatagttttgctgattcttagtctgtactaaagatttggttcttacagacactgtggttgagaattacattattagtttatcaattttcatagattttactcccaggagaatttcacaatttctttattttactgaacactgtctccacttaaagaaaactctttttctggccttgttaaataactatatatattttttaatcatttgactctctgttcatgtaagaataaagggaagtatctaaataagtctcttttttcccctctaatctgcatatgttggactcaggtctttcttgagagagcaccatgagaaacactaattgtacttgactaacaaaaacaaaactcccctatttatgtagatgaactgactaagcatcgtgattaaatccgagatcaaagaaacttcagaaatgaatcaaatgctctagcaagtagcatcgattcttataaatctcttccatgccattcaaaattaactggtttacttctagtctccctatgaaaaagaagagaagtgttaatatgaggaaatactttgttgtttccccagatgtccggagcagcacttttcttcctcttttcactttctgtatttgttagactgttccacatggcaagaaatagagaccagctcaggtcatctcgggtaatgggggtttattttaaagctacatgggaagtaatgaggacaggaaaaaagtctcagcaagcaggcaggaaggtcagatgaagaaccggaacatggttcatcactgctctgggcactcgggcacaggagctctaggcaaccatcaacaacccctctgctgatccagccccggcttgaatagtctctcatgcttatgcctcagttcctcccatttcctttacttccagttttctacctggctgccagctaatttggatgccctctctctaatttacagcatctgttttctcttagcttctattgcctcactgttcctgctactccatgttctctactttttgcctgctctgtgtatatctatcattgttttgccacccaccatgtttcatatgcaaactctgtgagaggaattgaccaggtctgttagtcaccgtagagtacagagattctgccctcatagatactcaccaagacggtgcctgtggttctggcgctcgtgaattggtgctcacatgggttccaagtggcaagatagatagtgtgattgatagaataaatggactcccatgaataaagagaacctctgaaatggagttgtggacatgagggactagaagcactgtgtcctgtcaggtgttgcctttattagtctgtcagaatatttattaaaaaaaaaaaagcaaagcattttccttgggaaaaaccaaataaattccattgatttttcaatacaagtttcttgccatcaggagatatgttggtctaaattcaagtacagattcattttaatttgctaagtttatgtgattgtttacaatttttagtatctgcagagtacagggggaatattaccaatttctattttgctattttagtaattttagatttgaaatgtattttatagaatctgatctttgtgagagttaacagtttattctttcatgtgaggaaaaatgcacacatgtcactaccaatgaagatgtatgcctaaaaaaatgatgggaggtcttttatacttttttaaagaaatattctgtgtcttaaagcatatgttatttcacagtaattccattacacatgtcttacaaaaacttgtttaaaatgttgtgaaaggaaaacatatctagtcttgaaataaatagttaagaagttaatttgtgctgagtttaaaaattcatatcaaaccacatttgagtgtgtatcataaaatcttttaaactgttttattattataatttatgaatgatcaaagaaaaatatataaatatgtaaagcttgttttatatttctatctgaaaacttaaactatttatctgagtatctttaactgggatcatttttctaattggcattccaaataaaagtgttttttaatacatcattaaacagaataaatatccatatttgtctctatggaagaaatgtgaaataatcaataaacattatagtagcttaataaaatatttttgcaaatactcagtgattgatcacattctgcccaagtcaattccagaagaactgcagaatggggagggatttggatatatcatcatgttccggccagtgggctcgacaacctggtccaaggagaaagtgtcatctgtggaatcatcaaggtttgtctacagaaatgaaagcatcatcccactgtctccctttgaagtcaaagtgggtgtgtataataatgaaggagaaggatccctgagtactgtgaccattgtctactctggggaagatggtaagttgtcctcaactctggttttctttgagactctatgcatagtttgtgttcccttgttccattttcaatgaaccactctgctaaagatggttatgtctttctctggatggtagaacctcaactggccccaaggggaacttctctccagagtttttctgcttctgaaatggaggtttcatggaatgctattgcctggaatagaaacactggaagagtgctgggctatgaggtaatccacattaatttcacttttgcttatgaatgtgccaatggacttcgcaatagctcctattcaacagtcctatcctactagcctgttgttagcatatgataatgtgtgtctaaagctaaagcagagaatgaagttgagacagggtaggtgagcccccacattgagaggcttagcctgggatgtttcttgtcctcgctcaagacagaattcgagagtgagccagtggtaaaaaaacaaaaacaaaaacaaaaacaaaaaaaaacagctttattgaggcagcagtgttacagttttgaaattgcttctgcagagcagggctaccccataggcagtgtgctaagagcagcagcttggaagcagttctacactcatatttatacccacttctaattacatgcaaattaatgggtgagttagttattcagaaatttctagaaaaagggtggtaacctccaggccattgccatagaaagggatggtaacttccaggtgttgccatggcagtggtaaactgatacggaactggtggttgtgtcttatggagaggtgctttagcctcttccctgtttcagtcagtcttcaatctggtccacagtaaagtcctgcctcctccctcaaagtaagggaaatctttctaggtaattcaaagcaaacaaattaacacatagtagccatttttaaaggcatacagattcagtaagtaagatgagtaagctctaaagatctgctgtacaactgtgcacacagagtcaacaattatgcattgtacccttaaaatttttcaagaggacagatctcatattaagtgttcttaccacaacatcatttttcaaaagtgatcaggtgattatatgattaattattcaaattgcagtcatttttttttcccttggtaagaggtgaagtctgctcctcaatcatcttacaccatggaagaatttcattgagaaacctgctttgtgaattgcagtataacttggaaagatgtaatcatctcagaaaaggcagttaagtaatgaaaaaaaatacctagattgtcttgaatctgctatttttagtctatgaagaataaggcaaattacatttgtaggccttcatctcacaaagtaaagagacaagaacattttaagggaaagttgttcatcactcaatctttttcaacttgcaaattcagtgattcacaaaatgggtaacataatttatttaactttggatttagaataaatgtataatcctaaacattcttaattttgcctatatatatatatatatatatacacacacacacacgtatacatatacatactatatatacacacatatatatacatatatacacatatatatacatatatatacacatatatatatatatatatacacacacacacacacatatatatatatatatataaccataatcctctgattccaacagaaagttctactctcaggacaggtgtcttttccactccatgccaagaatgccttacctcttatctgaaccctagttacttctcaaatttcatccctagtcgcctcttctctctgagctctactcccatcaattcctgatgtattttgtcaaattcttgtagcatattttttctataccacttctttgcaatgcattctgtgacttattttcacatacactgtggattctaacctcttagctagatgataaggggcttgaaaataggtacttaatttattctctttttttttcaatgtacctaaaacaatgctaatgcaaaggtagggttcagtataaattgaattattaattaacctgtgattcaaataactctgaaaagaaatgccaatagcaagacattataatgaaagtctttgactgattatatacaaatgtgtttttgtctgacttgttatacatcatttgctaaagctggtaacctttagatagctcataaaatactttattttggtaatctaaaaaatcacgttctctaatttccattgtgaatttgcattcatgacttttttcctcataaatattagagaataacaattttgttgttgtataaccattttaattagaaaacgtttttgtcatctatacttctgtcttcttcccatattccttgtggttgtggttgatagttgttggtaaaaaatgattgatagttattggggaacaataaattgcttgttttggtttttaattatcaggtcttatactggacagatgactccaaagaatcc

SEQ ID NO: 617 - DNA, 107 bp, Homo sapiens
tcagttgcctacctataaaatgaggaaaaagtcatatttatgttttcataggttttgttcaagattgaaagagattattaataataagtgtccagtacacaccttaa

SEQ ID NO: 618 - DNA, 107 bp, Homo sapiens; identical to SEQ ID NO: 617

SEQ ID NO: 619 - DNA, 5968 bp, Homo sapiens
cggtgctgggccgcgtggccctggcgctggaggagctggacgccccacgcgcgcctgccgccggtctggagcgctggttcccgctgctcggggcgccggcgggcgcagcgctgcgggcgcggattcgggcgcgtcgcctgcgcgtgctgccgtccgagcgctacaaggagctggcggagttcctcaccttccactatgcgcgcctctgcggggccctggagcccgcgctgcctgcgcaggccaaggaggagctggcggcagccatggtgcgcgtgctgcgggccaccggccgggcgcaggtgcggcaccgcgacagcgcggaccggggctaccaggggtagaccgataacgcgcttcgggcaggagttggggcgcaggacctgagttgcacctgtaatgggggagacaccttgaaggggtgtgaggggcgtggtccaagtgtcacctgtaagcggcggggcacctagaagggcggggcacctagaagggcggggcctgaacatcacccgtaaggggcggggcaccttgaagggcgggacctgagcgtcagctgtgaggggctggggctgagctgcacctgtaaggggcggggcaccttgaaggactgggcctgagcttcagctgtgaggggcggggcctaattatcacccataaggggcgggacaccttgaagagcggagcctaagcttcagctgcgacaggggcctgagcatcacgcgtgaggggcggggcccaggttgcacctcagcgctgaaaggcttaaatttctgctgtgagggttagaggttccggcctcggttatgagccccagcagtaaggactgggcctaagcatcagctacaaggggcggggcctgtgcctctggtgtgagggaccagccaaggatccgaattcccttggactctgtctgcatctggtgcaacctgacctcctgcccttcctaggcgctggtgactgacctgggcactgcggagctggcgcgctgtggaggccgtgaggcgctgctgttccgggaaaacacattggccaccaaggctatcgatgagtacatgaagcctcgtggcacaggattacctccaggagaccctgggtgagctgggggagagtccatgtcagcggcctgctggtgagctaggggacctgggtgaagttctaagagtccttgagcaacctggattctggtagtgagtggtgttttgggggtgctaggatcctggggacaattgggagctccccaagatgttgggtgcctccggaataacctgaagacaaggttggaggatgggtgtggcaggttttggtggtcatggccccagcccctatctggctgtgctgggctgcaggacaggttgtgcggcgtctctgtgcttctactgaggactgtgaagtggaccccagcaaatgtccagcctcggagctgccagagcaccaggccagacttcggaacagctgcgaggaggtcttcgaaaccattatccattcctacgagtgagaatcagggccccagcagcttagcccacccctgcttaccatgctagccccgacctccagtttagggtggccagataaaatacaggagacactcagttaaatttgatgcaataattgggaccatgcttatactaaaaaattactcatttgaaccaggcatggtgactcacgcccgtaatcccaatgctttaggaggccgagacaagaggattgcttgagcccaggagttcaaggccagtctgggcaacatagcaagactccatctctccaaaaagctttttaaaaatgagctaggcatggtggcacacacctgtattcccagccgaggctggaggatcgcttgagcgcaggattcaaggctgcagtgagctatgatcatgccacagcaccccagcctggttgacagagaccctgtcccaaataaaagtaaaaatataaataaaaatcactccgttatctgaaattcatgtttaactggatgtcctgaagtttcgtttgctgcatctggcaaccctatcaccatgcaaccctatcaccactgaccccaagtaacctgagacccaattccttgtcctgtaaccacagttgattccatatccccaatttcatgccactggctccagttaacataggacctcaatcctatgaccagatgatgccccaagtccatgatccctggctttaagtgaccctccacctcaaatcccatgcaactgatcacaggagacctgggattccaatcccttgacctctgaccctaggttaacctgcatacctaatccctgacttcaatcaagtgacttctgaccctaggtgacctccagagccccaatcctactttatatcttgtactctggcccaccagtctcatgtctaattataagtacatccaagctcataacctctgtcttcatgtgaccctgtatccccaactataagagtattatccccagcgattgccatagctacaccataagccatggccccatgctgattcataaccccaagcattgttatctcagatattcccaatcctagagcccagaccccaggttcagtgagaaggaagcctgcatgggcttcatgaatagctctctggaggatcatggaccaatcatgcagtgcttctgggactcccaaccttatgactttaacctttatgcccatagcctccccgtctgaccattcattgcctcttctgcaccagctggttccctgcggagctgggcatcgtgttctcaagctggcgagaagcatgtaaagaacgtggctctgaggtgctgggcccccgactggtgtgcgcctccctcttcctgcggctcctgtgccctgccatcctggcacccagcctctttggtttggcaccagaccatccagcacccggcccagcccgcaccctcacactgattgccaaggtcatccagaacctcgccaaccgtgccccgtaggtgctgggaagctaggggtggggggaccatgctgggagtgtgggggtggcaggtgcctgacctgacccacccagcctggccctgatccaggttcggtgagaaggaggcctacatgggcttcatgaatagcttcctggaggaacatggaccagccatgcaatgcttcctggaccaggtagccatggtggatgtggatgctgcccccagtggttaccagggcagtggtgatctggccctccagttagctgtcctgcatgcccagctctgtacaatttttgctgagcttgaccaggtatggcctgaacccagagtagggaggcaagaaggcttgggagactctgaccctggagactttgctcagtctctgtcctgcatgcctcaccagacaacccgagacaccctggaaccactgcccaccatcctgcgagccattgaggagggccagcctgtgcttgtgtcagtgccaatgcgtctcccactgcccccggcccaggtccactccaggtaacctcaagtctggtctggggtctgatgggtgggaacaggaaggagcagggctcagacaggggtcagaggtgaagttggatcattgtgagcagaggtcaagcccagggtcagacgggaatcacaggttatagaaagggttgggtcaaaggtcacagtgtgtttgaggtcggggatgagaggagaggttagggtggagagatgtcaagggtcatagagaggacagtattatagtcagaagtcaaggacaggagccaggctcagtggctcatgcctgtaatcccagcactttgggaggctgaggcaggaggatcacttgaggccaggaacttaagacaagcctgggcaacatagggagaccccatctctaccaaaaaaaaaaaaaattacctgggtatagtggcatgtgctggtagtcctagatatttgggaggctgaggctggggaatagcttgagctccagaattcaaggctgcagtgagctatgatctagccactgcactccagcctgggcgacagagcaagaccttgtctcaaaaaaaaaaaagaaaggacaagttcacgtggggggtgaggtcacttctggtcaggtcgggatggggtcgtctcaggggccagtggagggtctaagatcctccatcccacccctagcctctccgcaggggagaagcccggcttcctggccccccgggacctccccaagcacacccctctcatctccaagagccagtctctgcgcagcgttcgccgctcagagagttgggcccggccacggccggacgaagagcggcccctgcggcggccccggccggtgcagcgcacgcagagtgtcccggtccggcgtcctgcccgccgccgccaatctgcggggccctggccgcgacccaaaggctccctgagcatgggaccagcgccccgcgcccggccttggacccgggactccgcctcgctgcctcggaagccgtcggtaccctggcagcgccaaatggaccagccgcaagaccgaaaccaggcactgggcacgcaccgacctgtgaacaaggtaaggtcaggcccaggtccgcgcctggggagtgggaacagggacgcgactggggaagactgaagggccaggcaagtctgggttcaagtacccagctcgctgtgctgtgtgaccccaggcctagcccgaccctctctgagcttcagtctccccagctgtaccgcaggagggatgttccccaactaggcaggccggtgatgacgctgagcgcttgggcctgggaggtcagggtctccggggagacacaggggcgggacaacgggtcagattacagctgctctcccaccacagttggcagagctgcagtgcgaggtggccgctctgcgtgaggagcagaaagtgctgtcccgcctcgtggagtcgctgagcacccaaatccgggccttgacggagcagcaggagcagctgcggggccagctgcaggatctggactccaggctccgtgctgggtgagcccagccctctccattagctccgcccccaggtgggcccgatccaattagatctgaccaggccctcccccccccccccaaaccacgcctagcacggccaagccccaccctggccccgccccaataagtctgtccaggccctgcctcttggcaagccccgcccccaggtggacccacccaacgaaggtcggcctaggaccctggcagattctctcatccaggccccacccctccatcagcccctcccaacctggctgggccgggcactgagatatctcagcctgggcactccctccagctcagtcacgaccccacccaggactggccaaaccccacctccaagggatgattgataggtcctgtcattccaaccattcccgtctctggtccgacccttcttcaagcatatttaggccccgcccctcagtctggacaagctccgcctccactccaagctccgcccccggagtccctggcactcccaccaggagctggaagggacttccttagcctctgcccttcgccccaatcccccgacccccacaggagctcagagtttgattcagagcacaacctaacaagcaatgaagggcacagtctgaaaaacctggtgagattgccatctgagccctggggcaggtctgggcggtggaggagcaagggttgcggtgcagccctctcctggtttctgaaccccatcaccactgcctccccaggagcaccgcctaaatgagatggagagaactcaggctcagctgagggatgctgtccagagcctgcagctttctccaaggacgcgggggtcttggagtcaaccccagcccctcaaagcaccctgcctcaatggagacaccacctgagctgcccatcctgcctcatcacacgtggtctgggagcagagagatagccatcttagggggggtgtctgactttgccttagccctacttggcctacagtggggagtggagctgctggtcccaaccactctggcagtatgaagttgcccagtaaaatcttgatttcagtgaaa

SEQ ID NO: 620 - DNA, 2787 bp, Homo sapiens
ggaaaaacagaaccggagactgctggtcccaaccaggtccacaacgttcgggtaaggcagccagtgaaggtgggaggtagaggggagagccaagactctcggaccctcaaagctgaaagggcactcttgctgggtgatctggagcaggttgctgaccctctttgggcctcagagtcccagtctgtcaaatgaagctaatgaaataacctttctctaggggttgtttatgggaagccaatagagagtgcaggagccaggcagggcagtgcgcagctatagtccaagctactcgggaggctgagcagagagcactgcttgaggccaggagttcaacaccagcctaagcaacatggggagacttcatctcttaaataaataaatgaatagtataggagaatatatgattgatgctttacaaatgggagtttgggccaggcacagtggttcacacctgtaatcccaacattttgggaggctgaagcagaaggattgcttgagaccaggagttcaagaccagcctgggcaacatagcaagtccccaattctacatggtaacattcacctgtagtcccagctgaggcaagaggatcacttgagcccagaaatttgaggctgcagtgagccatgatcgcaccactgtactccagcctgggcgacagcacgagaccctgtcttaaaaaaacaaatgaacaaagaattaggagctgctgattgctcttattattcctgctaatacagcctgagcttggtgttggtcctccaagaccagtagatcctctgggatgtcttgggagggaaggagctgaggaaggagcacagatttctgtccagctgacattcccttccccacaggggttgctcaagaggctgaaagagaagaaaaaggccaggttggagccccgggatgggtaagggtgtatgagaggctggaggggctggggttcaacactggcccctcctcctccacctcctgcatatcattccaatctacaccaaacaccccctgtggcctctgtgttctgccccacatcagttgatgctggggacattgaatgatctagcacagagccagggtgggggcaaagtctgacacaataactctaaaatgggagctaagtcaatcaactggtctgggagggttagggaaggtacccttgagctgagatctgaagggtggatggaagttaactaggccaacaggggggtggaaaaagcattccaggcagaaggaacaacaagtgcaaaggccaagaggccgaaagaagcaactaaaacaaggccaagagggctgggtgaagtggctcccagcactttgggaggccaaagtgggcagactgcttgagtctaggagttcgagaccagcctgggcaacatagtgagaccccatttctacaaaaaatacaaaaattagctaggcatggtggcgggcacctgtagtcccacctactggggaggctgagtgggaggattgcttgagcctgggaagttgaggctgcagtgcacagagatcatgccactgcactccagcctgggcaacagagcaagattgtgtctcaaaaataaatagggctgggtgcggtggctcacacctgtaatcccacagtttgggaggcagaggcaggtggaacatttgaggtcaggagttcaagaccagcctggccaacgtggtgaaatcccatctctacttaaaatacaaaattagccaggcatggtggcgaatgcctgtaatcccagttactcaggaggctgaggcagaagaatcgcttaaacctgggaggtggacattgcagtgagccaagattgtgccactgcactcctgcctgggcaaaagggcaagactccatctcaataaataaataaataaataaatagggctgggcacggtggctcacacctgtaatcccacactttggtgaggctgaggcgggtggatcacttgggatcaggagttcaagaccagcctggccaacatggtgaaaccccacctctactaaaaatataaaaattagaaaattagccaggcatggtggtgggcacctgtgatcccagctacttgggaggctgaggaaggaaaatcacttgaacctggaaggcagaggttgcagtgagctgagatccagccaccgcactaaacaagactctgtctcaaataaataaataaataaataaataggataaaataaaacaaggccagggaggctggagctcagaaagtgatggattaggtggagggagatgaggtgacaacatctggacccagcttggtcatgtaggtcaccaggagttgagtttatcctaaaagcaaggaggtgccatggcggggggtggggggggcacgggggagaaacgggatccgaattgggttgaagtccttcctggccttcctctacccttcaggctatgggggatggggaagaggcaggaatgacggtgtgctcacccacccccttcccagaccccccagtgctctgggctctagggagtcgctggccacactctctgaactggacctgggtgccgagcgggatgtgcggatctggccactgcaccccagcctcctgggggagccccactgctttcaggtaagtgtagacagtccacctcgattccacctcagtcccacctcccaccctttggcttcacccttggcctcgatcacaccgttggattctccatcccaacaggtaacctggacgggtggaagccgctgcttctcttgtcgctcggccgctgagagagaccgctggatcgaggaccttcgtcgccaattccagcccacccaggtca

SEQ ID NO: 621 - DNA, 1186 bp, Homo sapiens
aggtgcaggagctggaccctgtggtagggtggaggcccgccccaagcctggactatcgcgtgtgcctgccctacgccaacgcagtgctgctcgagatccagtgcttcatcagcgtggtgcccctggggctgccgcgcaccctcaccctcgacacccacctgcacagccactgtctgcccaaaggtacccactgagtctggggatcccgtgcgggacccgggtgcatgagatcagccagaatcagcaggtgtgcgctgtgcagaccaaaacacaatcagttacccctggagcaggaaggcagctctgccttcccttaggctttttgttgttgttgtttgagacggagtctggctctgtcattcaggctagaatgcagtggcatgatcttggctcactgcaacctccacttcctgggttcaagcgattgtcctgcctcagcctcctgagtacctggtattacaggcacccaccaccacgcctggctaatttttgtatttttagtagagacaggtttcgccatgttggccaggctggtctcgaacttctgacctcaagtgatctgtcctcagcctcccagagtgctgggattacaggcgtgagctacttgcccggcctattcccttgggcttttaaaaagcgtcttggatggaggtggtgcaggtgctcaccaagcccgcaggtaacccaagttgcatgtatccccagggcacttttgtgattcccctgcttgtgactgcacaccgggaccccactcaattcaaagacccagactgcttcaaccctaccaacttcctggacaagggcaagttccagggcaatgatgctttcatgccctttgcctcaggtgcaggcagaggaggaaggggaccagcctggactggctctggggtacctggtgctcactgtgcacctgtgtacccggcaaagcagatgtgcctgggcacaggcctggcccactcgggtatcttcctattccttacggccaccttacagaggttctgcctgctccctgtggtacgccctggcaccatcaacctcacctgcagtgcactggcctgggcagtgtccccccagacttccagctccagccagtggcctgctgaggtcaggctccactatggtgggctcactggccctcaaacctccataccctcctcggtcaataaaggccctaaattgcagatgg

SEQ ID NO: 622 - DNA, 1182 bp, Homo sapiens
aggtgcaggagctggaccctgtggtagggtggaggcccgccccaagcctggactatcgcgtgtgcctgccctacgccaacgcagtgctgctcgagatccagtgcttcatcagcgtggtgcccctggggtgccgcgcaccctcaccctcgacacccacctgcacagccactgtctgcccaaaggtacccactgagtctggggatcgtgcgggacccgggtgcatgagatcagccagaatcagcaggtgtgcgctgtgcagaccaaaacacaatcagttacccctggagcaggaaggcagctctgccttcccttaggctttttgttgttgttgtttgagacggagtctggctctgtcattcaggctagaatgcagtggcatgatcttggctcactgcaacctccacttcctgggttcaagcgattgtcctgcctcagcctcctgagtacctggtattacaggcacccaccaccacgcctggctaatttttgtatttttagtagagacaggtttcgccatgttggccaggctggtctcgaacttctgacctcaagtgatctgtcctcagcctcccagagtgctgggattacaggcgtgatgacttgcccggcctattcccttgggcttttaaaaagcgtcttggatggaggtggtgcaggtgctcaccaagcccgcaggtaacccaagttgcatgtatccccagggcacttttgtgattcccctgcttgtgactgcacaccgggaccccactcaattcaaagacccagactgcttcaaccctaccaacttcctggacaagggcaagttccagggcaatgatgctttcatgccctttgcctcaggtgcaggcagaggaggaaggggaccagcctggactggctctggggtacctggtgctcactgtgcacctgtgtacccggcaaagcagatgtgcctgggcacaggcctggcccactcgggtatcttcctattccttacggccaccttacagaggttctgcctgctccctgtggtacgccctggcaccatcaacctcacctgcagtgcactggcctgggcagtgtccccccagacttccagctccagccagtggcctgctgaggtcaggctccactatggtgggctcactggccctcaaacctccataccctcctcggtcaataaaggccctaaattgcagatgg

SEQ ID NO: 623 - DNA, 8165 bp, Homo sapiens
tcagatgtgtgcagctctgaggtaaacttttatttcttggctgacaggacttccacacccatgctcctcctggcaccttttactctgcccaagcagtggcagcccagtccaaaaggtgcctgccatggccaaaggggttggggagtcacttcacattccaggctggaggagtgagaggacttgggggtactcctcccaccccattgccagcaagaggccatgactcacctcaaccccaagtcctgcatcctggtgggaagtgacaatgcctcctcccagctctccatacctaatggggtcatgaccagacagggtaggacccaggcccccagcttcagttggtaacggtggcctccacggctgccccctgtccaggtgacaaccccagcccccatgatggggcagcaaaggtctcttctcctccttggtcctcagcaacagacagagccctccacaccaggcaggacagaggcaaagtcagaagcagcagcggtggcagggaaggagcagccagcacaggcccagggctctcctgaagtcatttaagctgtctgccatgcggctctgggactggccactaggtgggcgtaggcggctgtgatacaggtacttggacacctttctgtcctgatgctgggggtgagaggggacaggagacagtgagtcatcagaaggacaaagaagccaagggaaacctggggagatggggagaggaccaggaagaaatggggctcctgttggggtaccaggagagtgggctaaggaaggtgggcagagatgaagaaaaatgagtggtgggatttaacaagaggctgatgagggggatggggtggcatcaggcccaagagggcccacagaataggaaggactgaagggagggaagcaggtacctagctgatacttgtctttggctgctgcccgctccttggcatcaaaataccagacagtgatggcgtacctggagaccagggtggttggacattagttttctgcaattccagctaccatatccacacacactaggcggccatccttttgagccacccggttctgctcccacctaggccccctctcaatacttcgtcgctccctagtcactctgaggctctgacaggacattgtcacagggggagcacctgggtgcgtctccagaagtacaggtcatacctggtggcataggctggcttcacctcgtgggggttccgccggtcagaccagaaaatgagcaaccggtcaaagagtggctcgatgttggctaccacgggccggccctcagggaagatctgcagcaggccgccatgcacctgggggcaggccaaaggatgaggctagctggtacggccaggagccgctgcctcccacggtgccccgggagcccactaggaggcgcagcgtctgcctgcatcactccctcccacccctcgggctctcaaagtgaatgacaacccagagactgcatcaccatggagatgggcaggaagctactaaagacaggaaaagggggaaagtgttcattacaaggccgggtggggctgggcagacagcaccattcccggaaagaggggagttcccaccacacagtccgctagagaggaggaggtgccatttcccaggaagagccggcagatcgcactgcccgctgtgtgttgagaagagaaacaggagaatgccagaatctgggctgagagtggaaaatggagtggacgcacgccacccccgccccagccctagccccagcgccaccctcaccctcaccctcacccctaccttaacgtcccagttctgattcaggtaatagatacaggtgatgcagcgcccatcgccgtggggattgtcaacgtgccttacgtacccgagcccgttgcctgggtaacacgccaccatggcctggcagggatggagggaggtaggtttactggggctaggcaggcacatcttagagaagcagccatgaattacctattttcccacccctccttgccccatcttccccatgactccttgggtcaagggttccaagctcctgccccaaaagactttctttttcagccaaaatcccatccccaagtctatcagaaacctcagctcctgggcctcaagagcccactccctcccaacacacatacctggggcctggcacccagctagggctcaattagtaacagagtttgatttgtttcaagataccccaaaccccacctcagccatttcagtagaataataccaatttaaacattttcaggtgtgcaaggaggtggcctcacagccctagaccaggaattcttacccttggctgtggagtggagccccctggggagctctgaggttctgaagtacctggcctaaggaagggcctgaaattggtaaagcttcccaggtaattctaccatgcagcaatgttaagaactgctgccctggactacaaagaatccccactaaattatctgtcccatagacctccgaacaggagccaaaagctacagtctgaatagaaagacctaattccaactccaaggataatttgctgggtaaccctagccagttccaacacctgaatgggcctcaactgcctgatgtgtacagcaggggtaataaacactgctgtttacagcggtagcaattaatctctctgagaacataacttgggaggttctggagccccaactcctggagatctaacaggactcattgcagggcttggtttctctgtctacagggttctttcctctgcctgacagttgccactcccctgacccagccctacaatgctgtggccagggccccgggatgtttgtcatcagggagctggcagaaaggtggctgagaggtaaaggaaatggcccagccacttctgcagacacaattccctggttcaagtctcagtgctgccacatgagctgtggcatcaggcaggtgacttcctggtctcaggttcctcatccatggatccaatggagctcacagctatttcacaggttgttgtggaacaagtgaacaagataacaagtgtctgggaagacagccagcacagtgcctgccacatggagaactggagcacaggctgaaatgccatttaaaaattttaaaaggtccctgtcccaccctctgcccaaagtcactgcagtggcaagatgaggtagcacacaaaaaggggaggactggcacaaggacccttcaacttctccccagcccggaccatctgtcttgacctctctgccctgacctctctgccctggtacaactctgctggcgtccattccccacgaatgctcagctacacctatgggcccggcccagcaagacagtcccaagataaacattcacgatcaaacatcagtggccactgccacaacaggatgcttgccaagcacgcacgccacagcagactgggctgcttcaatcctcaccctccccaggacgcctcccaacacattatcccagggctcaccctctgtggtggatgttaagctgctctgcattaaccatgtgcacctcatccaccagaccttgccctggaaagagagggctgccaccatctactgccacctagcagtgggaagctgacaaccttctctctggcagcaccagagtacaattagtgagaaggccccccagggaaaaccctaatggctacacttcaaggttcaggagggggcaccttctttgcactgctcactccctatggaagggtcggcactctgagcaaccacctcactgggagaagaattgggccatggtccaggaggcttagaaacagtgagttactgactagagatgggcaagacctccccaattaggaatccaatcagagattacactgatgatgcacgtggatgggtggcagggaaggggtccagtgctgcaccctcttcccacaattcatccccacacagcagccagagcccctcctctccaggtcttcactccatcctgagaaaatacaaattcccaaccacagcctcaaaggcccccaacctcatgtgcctctcccatcactctgctccatgcctcaacaggctgagctcatcgccaccacaaggcctcagcactggcctgggacactcttccttctgaccctctttgttattcaggattcagagaccaagggtcaccttgagtactccggctgattgtccgttccactcctagcaacatggcatcagcacaggcacctgtttacctagtactgccctggaaggcagccacagggaagcccctggggccaggttggtctccccagtgcccagtgcagtacctgcagactggagtgcactgctctgggcctcctctgcaccccagccctgctatgtttcctcctgccctgtacattctcacacagcgcctcccaccaagcacatgggactcacacagaaacaggaacctgctctttagggccccacccttcccccacatatacacaccttgggggtgaaagcatcctctggccccaaggaaagtatctacttcctgccctcacaggggaaggcctcaggaaacttgctctccacccctcccacctaggggagggacaggtgggaccagggccaggagaccaaagacttaaaggctattggtgacaatctgcctgccaagagccccacccccactacacacacaccccagtcagaagcctgtgactgtcccacctccaagctgctcttcaaggagcaaaccaagcaagctggactctccctggggtcccctctggtagcccttgctgccagtgggagtcaactctctcccacctacaggtcaacggagcacctgtccccaaccagggagttgggggaaggaaggatgacacaggagctccactcagaacgactaagaagcacgtttctactggctctagccacactggtgatccatgtccccacggcaactgctgcagcccacctgagcaccccacagccttactctggagtacaggagagagtccagatggggcccatctaaaagcgggaaagcctggagttgctgtctcactggggaggggagggctcctcccctatgttctcagtccagcctggcctgtccttacttccctaggacaatcaaggtcacctagggctaaaaaagtccaaacacgccccttccccaatcctcgctggggccctgtccccaaccacatagaaagtgggcaccagaggcaccaaaacacaagagatcttctcctactctcccctccccaaactgccagactcactggggatgtaacctggttttcgtattccgtggatcagcaaattgaggctcagagcagtgtcccatctgggccactcagcccttctggtctccccctgacgaggacgacagccaacctggggtgaagatgctgagccagggaggccactgatcccgcccgcacaggagccaagcccagggaggggccggctctggctcagctatcaagtaacgggagggagagggaagtagaacaagttccagctggggtggggaggaaacaggccttggccccgggggagccctggtccctgagccagctccagcctgagaggaaagccacacagaagcagaacccaagatgggatctgcaggaggaggcagaggacatcaggagctcagcctcacgcctgcagggcacaacactgcccgtgccatcagccagccaggcatcactgtgttgagcagtgggcactccccacagggccttgtccaaaggacaccaagccttggactcaaggccaggcccccacaccacccatgaagacaatgatcctgtcagcagcccggaaaggccctatggaccactgtcctgtgctgggctcctgaccccaggttcctgaacaggcagctggaggccatgaggccttgacaactgcccggaaactccaagcaaatgagcatttgtcttaagagaggatctgtggcctctgacagattctcaaaaagacccaggctccaaaataccattaagaactattgttctaaagcaaaaagaaaaagggactaagaacaaacacataaaggcagaggaagagacagacatgggtagggaggaagtgacacacaggacagggggaatggagggcagggactgggacagtgaagggtgggagacatggggatgagctccacctgggccaacaggcagccacccagtaccacccccaggagactgtcctcgatgcagatgccacagtggggacccagggcacaatgcagtccagggccaagcactcggcccagcgggcagcacccctttccttccctcagcccagggctcactcatcacagccaccctcccccttctgcttctcctgccttggagacaggatggatggactagaaacatgggccagcaaacagggatggacgacaggagcacagggaaggatgtggacagggacagacagcaacagagaacggccaggtgaactgtgtgcctatctacatccccgtgcttggtctggggccacagactgacaccaggaggccatgaaccccaccaaggtccacgctgtgaatgtcagcagctctcatgagtttaagagggttcctggcaaagtcaagaaccactgtggcgatgcttgaaggcagcatgctcgttaagagtcatcaccactccctaatctcaagtacccagggacacaaacacgcagaaggccgcagggtcctctgcctaggaaaaccagagacctctgttcacttgtttatctgctgaccttccctccactattgtcctgtgaccctgccaaatccccctctgcgagaaacacccaagaatgatcaataaaaaaagaaaagaaaaaaaaaaaaaaaaaaaaagaaccactgtggctccaggacaaactcctagcttatcaggtgcacacattaaggcccgtagggaggataaagacccccccaagtccccacaagtaagcatacccactccactgaactgcctaaaccttctgtgacctcccagaagcctgtctccaaacccactgtgctcagagcactgaatgctgcaaaccagggtgctgcaaagcccctccaaagaggcccccacctagccttaccttggtgcgcccgttgatgacatagctgcccagccgccctgcgcagtggcggatgacggcgtccacatgggccatgagggcaccaatgcttcgacagcctggttcatggccttccacccaggcaatctggtccccacggatgctgcgcggcgggatcgccctctggctcactagctgcccgtctcgcaggcgcccaccccgtttgagggcctccacctcggccagcacgcgaccgcccagtgctgcccccaggaagctgtccttgacgcagatgccgtagtaccgcatgcagggcacgatatagtccagggccaggcgctcgggcgcagagggcagcgcctcctccatcagcccagcactggcctcaccactgccactgctgcagctgcagctcatgccaccctcccgctctgcctcctggttctcttgcctggcccagggccgtttgctgggtgaaggggcatccccaccatcctcggcccatttccgtttgggggcctcaggccgtgcgccctgggctgccaatcgctggcaccccttggtgaccagcgctgcagcgccttcactctgcagcggccgcagctcaccaccatcctgcccgccaaaaccgtcccgaagagggctggcagtggtagaggtggctgtggctctgggggtcccactccctgccgaggcctcactaggcactcctggacagtggtaggaggggagcaggggacagggcaggtaactctccactcccatcctggcccggccaggctcaggctccaagggctctgacgaagaccctggtaactgagggagagcctgacttaggggctgcggctggcacgggctgtccatggcagcagtgtcttcatcccccgggcatggagggcaccgcccgggcccatggtgccaccctcctccgcctcctcctccgcctccacttgatgcagctgggggccaccgggcctggcgtggggcagggtgaggcagggcagacagcaagagctcttctcgtgccctgggggttgcttgctggtccccaagtcctctgcggtccctaagggcttgggaagggacccttcagggtggctagagaaaggaaaaaaaaaaagggatgtgagagaaactagagacaggcaggcaggggaaagc

SEQ ID NO: 624 - DNA, 8159 bp, Homo sapiens
  misc_feature (835): n equals a,t,g, or c
tcagatgtgtgcagctctgaggtaaacttttatttcttggctgacaggacttccacacccatgctcctcctggcaccttttactctgcccaagcagtggcagcccagtccaaaaggtgcctgccatggccaaaggggttggggagtcacttcacattccaggctggaggagtgagaggacttgggggtactcctcccaccccattgccagcaagaggccatgactcacctcaaccccaagtcctgcatcctggtgggaagtgacaatgcctcctcccagctctccatacctaatggggtcatgaccagacagggtaggacccaggcccccagcttcagttggtaacggtgcctccacggctgccccctgtccaggtgacaacccagcccccatgatggggcagcaaaggtctcttctcctccttggtcctcagcaacagacagagccctccacaccaggcaggacagaggcaaagtcagaagcagcagcggtggcagggaaggagcagccagcacaggcccagggctctcctgaagtcatttaagctgtctgccatgcggctctgggactggccactaggtgggcgtaggcggctgtgatacaggtacttggacacctttctgtcctgatgctgggggtgagaggggacaggagacagtgagtcatcagaaggacaaagaagccaagggaaacctggggagatggggagaggaccaggaagaaatggggctcctgttggggtacccaggagagtgggctaaggaaggtgggcagagatgaagaaaaatgagtgtgggatttaacaagaggctgatgagggggatggggtggcatncacgccaagagggcccacagaataggaaggactgaagggagggaagcaggtacctagctgatacttgtctttggctgctgcccgctccttggcatcaaaataccagacagtgatggcgtacctggagaccagggtggttggacattagttttctgcaattccagctaccatatccacacacactaggcggccatccttttgagccacccggttctgctcccacctaggccccctctcaatacttcgtcgctccctagtcactctgaggctctgacaggacattgtcacagggggagcacctgggtgcgtctccagaagtacaggtcatacctggtggcataggctggcttcacctcgtgggggttccgccggtcagaccagaaaatgagcaaccggtcaaagagtggctcgatgttggctaccacgggccggccctcagggaagatctgcagcaggccgccatgcacctgggggcaggccaaaggatgaggctagctggtacggccaggagccgctgcctcccacggtgccccgggagcccactaggaggcgcagcgtctgcctgcatcactccctcccacccctcgggctctcaaagtgaatgacaacccagagactgcatcaccatggagatgggcaggaagctactaaagacaggaaaagggggaaagtgttcattacaaggccgggtggggctgggcagacagcaccattcccggaaagaggggagttcccaccacacagtccgctagagaggaggaggtgccatttcccaggaagagccggcagatcgcactgcccgctgtgtgttgagaagagaaacaggagaatgccagaatctgggctgagagtggaaaatggagtggacgcacgccacccccgccccagccctagccccagcgccaccctcaccctcaccctcacccctaccttaacgtcccagttctgattcaggtaatagatacaggtgatgcagcgcccatcgccgtggggattgtcaacgtgccttacgtacccgagcccgttgcctgggtaacacgccaccatggcctggcagggatggagggaggtaggtttactggggctaggcaggcacatcttagagaagcagccatgaattacctattttcccacccctccttgccccatcttccccatgactccttgggtcaagggttccaagctcctgccccaaaagactttctttttcagccaaaatcccatccccaagtctatcagaaacctcagctcctgggcctcaagagcccactccctcccaacacacatacctggggcctggcacccagctagggctcaattagtaacagagtttgatttgtttcaagataccccaaaccccacctcagccatttcagtagaataataccaatttaaacattttcaggtgtgcaaggaggtggcctcacagccctagaccaggaattcttacccttggctgtggagtggagccccctggggagctctgaggttctgaagtacctggcctaaggaagggcctgaaattggtaaagcttcccaggtaattctaccatgcagcaatgttaagaactgctgccctggactacaaagaatccccactaaattatctgtcccatagacctccgaacaggagccaaaagctacagtctgaatagaaagacctaattccaactccaaggataatttgctgggtaaccctagccagttccaacacctgaatgggcctcaactgcctgatgtgtacagcaggggtaataaacactgctgtttacagcggtagcaattaatctctctgagaacataacttgggaggttctggagccccaactcctggagatctaacaggactcattgcagggcttggtttctctgtctacagggttctttcctctgcctgacagttgccactcccctgacccagccctacaatgctgtggccagggccccgggatgtttgtcatcagggagctggcagaaaggtggctgagaggtaaaggaaatggcccagccacttctgcagacacaattccctggttcaagtctcagtgctgccacatgagctgtggcatcaggcaggtgacttcctggtctcaggttcctcatccatggatccaatggagctcacagctatttcacaggttgttgtggaacaagtgaacaagataacaagtgtctgggaagacagccagcacagtgcctgccacatggagaactggagcacaggctgaaatgccatttaaaaattttaaaaggtccctgtcccaccctctgcccaaagtcactgcagtggcaagatgaggtagcacacaaaaaggggaggactggcacaaggacccttcaacttctccccagcccggaccatctgtcttgacctctctgccctgacctctctgccctggtacaactctgctggcgtccattccccacgaatgctcagctacacctatggcccggcccagcaagacagtcccaagataaacattcacgatcaaacatcagtggccactgccacaacaggatgcttgccaagcacgcacgccacagcagactgggctgcttcaatcctcaccctccccaggacgcctcccaacacattatcccagggctcaccctctgtggtggatgttaagctgctctgcattaaccatgtgcacctcatccaccagaccttgccctggaaagagagggctgccaccatctactgccacctagcagtgggaagctgacaaccttctctctggcagcaccagagtacaattagtgagaaggccccccagggaaaaccctaatggctacacttcaaggttcaggagggggcaccttctttgcactgctcactccctatggaagggtcggcactctgagcaaccacctcactgggagaagaattgggccatggtccaggaggcttagaaacagtgagttactgactagagatgggcaagacctccccaattaggaatccaatcagagattacactgatgatgcacgtggatgggtggcagggaaggggtccagtgctgcaccctcttcccacaattcatccccacacagcagccagagcccctcctctccaggtcttcactccatcctgagaaaatacaaattcccaaccacagcctcaaaggcccccaacctcatgtgcctctcccatcactctgctccatgcctcaacaggctgagctcatcgccaccacaaggcctcagcactggcctgggacactcttccttctgaccctctttgttattcaggattcagagaccaagggtcaccttgagtactccggctgattgtccgttccactcctagcaacatggcatcagcacaggcacctgtttacctagtactgccctggaaggcagccacagggaagcccctggggccaggttggtctccccagtgcccagtgcagtacctgcagactgagtgcactgctctgggcctcctctgcaccccagccctgctatgtttcctcctgccctgtacattctcacacagcgcctcccaccaagcacatgggactcacacagaaacaggaacctgctctttagggccccacccttcccccacatatacacaccttgggggtgaaagcatcctctggccccaaggaaagtatctacttcctgccctcacaggggaaggcctcaggaaacttgctctccaagcctcccacctaggggagggacaggtgggaccagggccaggagaccaaagacttaaaggctattggtgacaatctgcctgccaagagccccacccccactacacacacaccccagtcagaagcctgtgactgtcccacctccaagctgctcttcaaggagcaaaccaagcaagctggactctccctggggtcccctctggtagcccttgctgccagtgggagtcaactctctcccacctacaggtcaacggagcacctgtccccaaccagggagttgggggaaggaaggatgacacaggagctccactcagaacgactaagaagcacgtttctactggctctagccacactggtgatccatgtccccacggcaactgctgcagcccacctgagcaccccacagccttactctggagtacaggagagagtccagatggggcccatctaaaagcgggaaagcctggagttgctgtctcactggggaggggagggctcctcccctatgttctcagtccagcctggcctgtccttacttccctaggacaatcaaggtcacctagggctaaaaaagtccaaacacgccccttccccaatcctcgctggggccctgtccccaaccacatagaaggtgggcaccagaggcaccaaaacacaagagatcttctcctactctcccctccccaaactgccagactcactggggatgtaacctggttttcgtattccgtggatcagcaaattgaggctcagagcagtgtcccatctgggccactcagcccttctggtctccccctgacgaggacgacagccaacctggggtgaagatgctgagccagggaggccactgatcccgcccgcacaggagccaagcccagggaggggccggctctggctcagctatcaagtaacgggagggagagggaagtagaacaagttccagctggggtggggaggaaacaggccttggccccgggggagccctggtccctgagccagctccagcctgagaggaaagccacacagaagcagaacccaagatgggatctgcaggaggaggcagaggacatcaggagctcagcctcacgcctgcagggcacaacactgcccgtgccatcagccagccaggcatcactgtgttgagcagtgggcactccccacagggccttgtccaaaggacaccaagccttggactcaaggccaggcccccacaccacccatgaagacaatgatcctgtcagcagcccggaaaggccctatggaccactgtcctgtgctgggctcctgaccccaggttcctgaacaggcagctggaggccatgaggccttgacaactgcccggaaactccaagcaaatgagcatttgtcttaagagaggatctgtggcctctgacagattctcaaaaagacccaggctccaaaataccattaagaactattgttctaaagcaaaaagaaaaagggactaagaacaaacacataaaggcagaggaagagacagacatgggtagggaggaagtgacacacaggacagggggaatggagggcagggactgggacagtgaagggtgggagacatggggatgagctccacctgggcaacaggcagccacccagtaccacccccaggagactgtcctcgatgcagatgccacagtggggacccagggcacaatgcagtccagggccaagcactccgcgcagcgggcagcacccctttccttccctcacgccagggctcactcatcacagccaccctcccccttctgcttctcctgccttggagacaggatggatggactagaaacatgggccagcaaacagggatggacgacaggagcacagggaaggatgtggacagggacagacagcaacagagaacggccaggtgaactgtgtgcctatctacatccccgtgcttggtctggggccacagactgacaccaggaggccatgaaccccaccaaggtccacgctgtgaatgtcagcagctctcatgagtttaagagggttcctggcaaagtcaagaaccactgtggcgatgcttgaaggcagcatgctcgttaagagtcatcaccactccctaatctcaagtacccagggacacaaacacgcagaaggccgcagggtcctctgcctaggaaaaccagagacctctgttcacttgtttatctgctgaccttccctccactattgtcctgtgaccctgccaaatccccctctgcgagaaacacccaagaatgatcaataaaaaaagaaaagaaaaaaaaaaaaaaaaaaaaaagaaccactgtggctccaggacaaactcctagcttatcaggtgcacacattaaggcccgtagggaggataaagacccccccaagtccccacaagtaagcatacccactccactgaactgcctaaaccttctgtgacctcccagaagcctgtctccaaacccactgtgctcagagcactgaatgctgcaaaccagggtgctgcaaagcccctccaaagaggcccccacctagccttaccttggtgcgcccgttgatgacatagctgcccagccgccctgcgcagtggcggatgacggcgtccacatgggccatgagggcaccaatgcttcgacagcctggttcatggccttccacccaggcaatctggtccccacggatgctgcgcggtgggatcgccctctggctcactagctgcccgtctcgcaggcgcccaccccgtttgagggcctccacctcggccagcacgcgaccgcccagtgctgcccccaggaagctgtccttgacgcagatgccgtagtaccgcatgcagggcacgatatagtccagggccaggcgctcgggcagtacgggcagcgctcctccatcagcccagcactggcctcaccactgccactgctgcagctgcagctcatgccaccctcccgctctgcctcctggttctcttgcctggcccagggcgtattgctgggtgaaggggcatccccaccatcctcggcccatttccgtttgggggcctcaggcgtgcgccctgggctgccaatcgctggcaccccttggtgaccagcgctgcagcgccttcactctgcagcggccgcagctcaccaccatcctgcccgccaaaaccgtcccgaagagggctggcagtggtagaggtggctgtggctctgggggtcccactccctgccgaggcctcactaggcactcctggacagtggtaggaggggagcaggggacagggcaggtaactctccactcccatcctggcccggccaggctcaggctccaagggctctgacgaagaccctggtaactgagggagagcctgacttaggggctgcggctggcacgggctgtccatggcagcagtgtcttcactcccccgggcatggagggcaccgcccggcccatggtgccaccctcctccgcctcctcctccgcctccacttgatacagctgggggccaccgggcctggcgtggggcagggtgaggcagggcagacagcaagagctcttctcgtgccctgggggttgcttgctggtccccaagtcctctgcggtccctaagggcttgggaagggacccttcagggtggctagagaaaagaaaaaaaaaaagggatgtgagagaaactagagacaggcaggcaggggaaagc

SEQ ID NO: 625 - DNA, 1001 bp, Homo sapiens
attgcttcggcctggccgggagagcggaagggcctggtgtgggagagtcccttgcactgccaagacggggccactggaaggtatttgggtggaagaaagccagtaagcccatggggctggctgggggcaggaccacgcgttatgaccaccgtcctgttcctacccccaggagccccgtttgaccccgtgcggctactggataatgctgtatccaatgttatctgttcttgtcttcgggaaccgctatcgctatggggacccggagttcctgaggctcctgaacctcttcagtgacaacttctgcatcattagttccagatggggcgaggtgagagggccggccacaatctttccttggtgcgtccagccttatgccaaatcccgagtacacagacctacctacaatggatcattagaatgggacagattcctggaagagttctagaacatccagtatcaaagtcctagtccaatctccctgtagggaaactaaggcctagtggccttgtgcagggcccatgttgagacagaccctgtctctccagatgtacatttgcctgtccctcatggactggctcccgggcccgcaccaccgaatcttccgaaacttttcggagctgcgggtcatctctgagcaaattcaacgacactggcagatgcggcagccagcggagccccgcgatttcattgattgcttgaccagatgggtaaggcatgggtcccagctctctaaactctatccatgccgcccaccaacaggtgcctggcacgcggcagcacatctcctctgcccacagtaacagcaggacccggagagccatttccaggagtagacgtcggtaatgacgacgcattttttttttggcgtcaccgaaaccacgagcaccaccctgtgctatgggctcctcattctgcttaagtacctagaggtggcaggtgtgcaacccggagagacccagaatgggaggctgcagtctggggatggctggagggtcctggaa

SEQ ID NO: 626 - DNA, 832 bp, Homo sapiens
aggagccccgtttgaccccgtgcggctactggataatgctgtatccaatgttatctgttcttgtcttcgggacaaccatcgctatggggacccggagttcctgaggctcctgaacctcttcagtgacaacttctgcatcattagttccagatggggcgaggtgagagggccggccacaatctttccttggtgcgtccagccttatgccaaatcccgagtacacagacctacctacaatggatcattagaatgggacagattcctggaagagttctagaacatccagtatcaaagtcctagtccaatctccctgtagggaaactaaggcctagtggccttgtgcagggcccatgttgagacagaccctgtctctccagatgtacatttgcctgtccctcatggactggctcccgggcccgcaccaccgaatcttccgaaacttttcggagctgcgggtcatctctgagcaaattcaacgacactggcagatgcggcagcagcggagccccgcgatttcattgattgcttgaccagatgggtaaggcatgggtcccagctctctaaactctatccatgccgcccaccaacaggtgcctggcacgcggcagcacatctcctctgcccacagtaacagcaggacccggagagccatttccaggagtagacgtcggtaatgacgacgcattttttttttggcgtcaccgaaaccacgagcaccaccctgtgctatgggctcctcattctgcttaagtacctagaggtggcaggtgtgcaacccggagagacccagaatgggaggctgcagtctggggatggctggagggtcctggaa

SEQ ID NO: 627 - DNA, 465 bp, Homo sapiens
gtgaaagcagaaatgcaaaagcacggagaagaccccttctgccctttctccatcatcagcaatgccgtctctaacatcatttgctccttgtgctttggccagcgctttgattacactaatagtgagttcaagaaaatgcttggttttatgtcacgaggcctagaaatctgtctgaacagtcaagtcctcctggtcaacatatgcccttggctttattaccttccctttggaccatttaaggaattaagacaaattgaaaaggatataaccagtttccttaaaaaaatcatcaaagaccatcaagagtctctggatagagagaaccctcaggacttcatagacatgtaccttctccacatggaagaggagaggaaaaataatagtaacagcagttttgatgaagagtacttattttatatcattggggatctctttattgctgggactgataccacaactaactct

SEQ ID NO: 628 - DNA, 454 bp, Homo sapiens
atgtttacattgaaagacattttcaagggacattaaagaatatgagaaaatttaaccatggagcagggtctttatttcatttgcagctgtatctactgcaccccatgcctggcaaatagtaagaattcagaagtaatgtgggaaggaaggaagctagccaaaatgatagagtacaccatggaaaataggatgaaataggtgacagtaaacaaggaatatttgagaacaatttgatacaacatctgggagcaattttgtggggtttgatggtgggatgtataagtgaaaatcaaataggatgtagttgtggatgaccttaacaagttcatatgttttaaaatcagggctgctgccgacaacagacattttagattacctgccagttatcagattccaaattttgatgtccagtagttctaatctagttgggctattcatttagtcagctaatatt

SEQ ID NO: 629 - DNA, 6815 bp, Homo sapiens
cagggttgctcccgcgtttcggttcagtgacgtcgtaaattggaatgaggcatccagtttagcaacagcagagatgacgactctgcgattctgagagtccctggcgagcccgggctagcgaaaagtgggggcagaacgaactacatctcccatcgtgccaggaggcggtcccgcccgtttccccctgggagttgtagtctaaccccctcggatccaacagcaacctcagtgcgtgaactctgttatccagaaggcctcgccctgccgccgcgcgaagctggaattcgtcggctagtagttctcgccggcaactagaggaacctgttggcgtggcccagaaggcttagcgggattgcacgaggttagttgctaagcaaggtggtctttggtcaactgccgcctggaccaaggcaacaggaagtgagtacctctattccggaaactagttatgaaccctccccgccccccgtcgccaacattccttcgttcccctaaatcagcctcttgccccattgctctttgcaggggtagaagaaggaagtgtagcggggtaaggaatgcaccgtcagggtctctcacaaccctttcccagctctcctccccaacaaacagtacctgggatggagccctagggtaatcgcagccacgggatgggtcgaggtgacaggcttcagggaccacacttcggcctttgcccgaccttccacaacttaagcgaagagaggccaccagccgtaacagggcgttaaagcccaggggaagattggtccttatgacttcctgccttccagccctcagattcatcgctaccccgaggctaagcgccatgcctcatattgacaacgatgtgaaactggacttcaaggatgtccttttgaggcccaaacgcagtacccttaagtctcgaagtgaggtgagcaagcttctctacttgctgtttcttgaccccacgctcccggtgggccacaaccaagaaagatgcctgtccttgtcctaatatggtacgttttttggattaatgaaatggtcaatttcctgttcatatctgcaggtggatctcacaagatccttttcatttcggaactcaaagcagacatactctggggttcccatcattgctgccaatatggatactgtgggcacctttgagatggccaaggttctctgtaaggtagggctttcctcatgccccatccctattggtgtccagttagcccagctgactgcagaggtgtttgcatccccacccccatgcccagtcagttctctggcagttagcagtcaggatgctctgatttacggttttttccactactgaagccctttatctgataagttcaaaaggccatctgaattagtgagattcaaagctaagttctgctccgatatttctgatatatgaacagaattttcccttttgtcctgtttagcagtttgtacaccttgccaacttttcccaccacccaggtcaccccctcacagtcacatgcatcccttcagttatgcgattgtccacattaagcattcactgttttagtccagaaactacagtttaagcattcaaaaatcctaactagaagatcctaggagaagcagcttattaattttctttaataagaacaattcattaataaaagaatacttctgccattctttttttaatcttcctcttctttaagtcctaggttcctgggagtttctgggatgtgccccaaatgggatgtgtttttcttatatacaagttgttcactttgaaatggaagatgctgctcctgtcagtactattacctgcctctatacttgttgctgagaaggtagagagttatctgggcactttgagaacatatgcactctgctggttgatccatgtagccctggttgatgaattctgctattgtttgtggctccattagtcttaaggacttcatatcctttttctatttttgattgctgtgtctttgtggaatgtcttgtcatttctttaaggttgatagttatgcagttttatttttactttatttttattgccattcagtaactgcttaggaatctttctgttgcccactgtccatctgccctgaccagtagagttcagaattggtgactctgactgcagagttaacaggcgtgctgtaatacatgaacctttttggggactgtcttgatgctttatgtggagcctggctttcagtattgctgacgagaggtaaagaaatcaggttttagagataagagccaagtcttactgtaataaaaaggttggatgcaagcaaacatctttttctaagtttggtatgtaatctgatgtgctcatcatgccacactctgccagtatatctccaacatctgctgacttcctatcctatggtgacttttctttgcttatcagtatgttgatgatagagttgttgagaaagcagaattcaataccagctttagctagatattgttgatctctgagtacgtatgtagagcacttgttgctagctaatacatgacttccttgggtttcttgttagttgcaagatttgtgctgtttcagccaactgctgtctcttgtctgtttgcatgtagacatgtaaggcacaaacaccagcatacacaatggcctttgaatgccttcctcaaagtattgggatattgtttgcaatctgttgagctagagaatatgagtttgatgagtcattatgtccttgaactttattaaaatggactgaatgaaacagattttttagcttgatccatgtccccaactaggaaatttgtccttttttccactagagatggagacagggtagggtagccccttatcagctcttatcaaccttaaggcattacctttggtgagcatccagatctactgaattactgctggtaaatgaacgagaacataaccaaaaatagtttagtactaggttaccttaggaggaggggctgagtcagtgcagagaaacacaggctccatccagcttcttcatggttctttcatgtctgctgcctgtcccactgcaccagcagcttgtcaccttttaagtcagaagcagtgaatgtgctggcagatgaaatccaacccagatcactcagtactttggtgggaaatctgacaagtactagcttatggtaaaaagccctactagtatttgtagagagaagaaaggttgaactcaaatcccagctcaacctgagttctttgacttgtttcctccccaacttcaatcatgtcctccctcagatagaataggtctgtttctagaaaagagaccttaataaagttttctcccttttgatgcttctttgtcttctccccagttctctctcttcactgctgtccataagcactatagcctcgttcagtggcaagagtttgctggccagaatcctgactgtcttgaggtaacactgggcataccctgctcccttccttatcccagttttccagcaattatattttggctttctggggaccagcactcaccaatgacccactggctgcccaccagatcatctctgatatgccaatgactctgtttctcccacagcatctggctgccagctcaggcacaggctcttctgactttgagcagctaaaacagatcctggaagctatcgcccagatgaagtatatatgcctggatgtggcaaatggctactctgaacactttgttgaatttgtaaaagatgtacggaagcgcttcccccagcacaccatcatggtatgtttctattacagtcggtacctttttatctttccactttcctgccactccgttttgctacatcagtccatttctcctctgctgcattatgatattcctagttcatttaatcatgatactggatgattatccatagttctaagctgaaaatgtctatttggtcagtgtagtatctctgacccttggttcatagtctttgtaaatctgatgtccctgatgtcactcaccaaaccatgatggaacatctgtgcactgtacatacctgtggtacatagacatctgcccactgaaatggacacatactagtcacataaaaaggggtcacatgaataatgatttatctttttacaaccttagaagagtggccttcattttcttcgcagcattgaggggtgtgtctactgatcatcaaaagccaatcaactggtcaaatgggtctttagcctatactaccatgccttctccctttccctgaagccagacaggttctatgacagaatggcttaaggacagaatatgtttgggtctcttgaggaaggggagctaaatctactgtaaatcagatgtgagcctggtccagtagttccctttgcctcactgaatgctcctccatgccacttcatgtgtccctgttgatcatagcaccttgttgccttagaaaagtgcatcatggacctcggctttaccctaggttcagtggtgacattggccactcactcctaccttggcttggtgttgggtggatgggtagggagcagggttctctaaagtggctagtgtaaaagccctcagagggcccagtagaggggacctagttatcctttctttgtaataatgttggaaagtcatggtccatgcataccgtaacaatacatgacctcctgtttctggccctaaggatgctgtatttcaattgctctgtctcaggcagggaatgtggtaacaggagagatggtagaagagctcatcctttctggggctgacatcatcaaagtgggaattgggccaggtaagctggttcattggggccactggctaccccccttcagtggcaaacacctgtggagcacgtcattcttacccttatcatgttcttcctaggctctgtgtgtactactcggaagaaaactggagtggggtatccacagctcagcgcagtgatggagtgtgcagatgctgctcatggcctcaaaggccacatcatttcagtaaggctcaagggcagggtagggtatgagcggggtttctgcagggtatggaggtggcagagatggattagaattcctgggttcttgttggctttgagttgggctgttgggacatcgctgagggcttgggaaatccatgttgtattcatagtgctccttactttgcaggatggaggttgcagctgtcctggggatgtggccaaggcttttggtaaggagcttgagggcacagaaggatgattctatacaagaggatgaatcacctctgagggtctagggtcaggctaagagaggctcaggaagtcattcagattctttcataatatgaattagtgactccgaagtctatggtatcatctggggcagccagcaggggacatctgagactccaagtgtgggccagggccatctgaccatctcctagattgctgcacagtgcagactcctgagccccagccatacctaaaaataggctctgaggaatgggacagcacatctgcatttttcattttgcacagcttcccaggagatcattactcccattaaagttggggatctttgctcttgggacacatgaaatgagtcttatttagctgggcacagtaaaatcaaatgaccagacgatgatggtaaaaacagcaaaaggagaaagcaaaagccaggcagggactctccagaggctcttttttaaatcttggggaaatcatacccactgaggaatagaggccagggcagatcaggcctgcgtggattgtgggtcagctagggaagcagaaggaggaagacgctggaatcattgtcaggactgagaatatggtgtgagttgcttttgagggtggccatgtgagcaccttggccagattaatctctttcccccctccatgatggtggcaggggcaggagctgacttcgtgatgctgggtggcatgctggctgggcacagtgagtcaggtggtgagctcatcgagagggatggcaagaagtacaagctcttctatggaatgagttctgaaatggccatgaagaagtatgctgggggcgtggctgagtacaggtatgtgtggaggcccaggagcttagtaatagtatggaggcagaactcatggctgctgagagggggatggtacagttctcagagaagcatggtgaaccggggctcaatgctagggtctgtggaaaagtccctgggcttaaggaatccagaaggagaagataataaagtttttcctactttaagagcctcagagggaaagacagtggaagttccttttaaaggagatgtggaacataccatccgagacatcctaggagggatccgctctacgtgtacctatgtgggagcagctaagctcaaagagttgagcaggagaactaccttcatccgagtcacccagcaggtgaatccaatcttcagtgaggcgtgctagacctgagcagttctaccctcccaaggcaccagtactctaccatggggcatcccaagtggggtcctcacccatcccagctactgcagctctgtattactttgtcatttcctgttgtctcactcctgagggctcctgcagtaactctgtacttctctatctgcacacacaaaatgcccaaggcactcactggggaggaagcaaggaagcaaacagtctgagaaaatgatgcaagaaaatcaaatgggaatctggggacccaacacaacatcctgaagattattaaaaggaaaagatgctgattggtacataaatcttttacatggccttggtctagaggaggcaggcttttagaatcatgttttgttaatccgcttcactaaattggaccttcacatatctaaaaagctctgaagtgtttgtatatttgaaatacctcaataaagagagagctcattgactgtaaa

SEQ ID NO: 630 - DNA, 3011 bp, Homo sapiens
gtattttaacaaatccaaagtttaattattaaggattacaaatatttttagcagtgtagttaggcaatccaagcctggacttccacttcattcctactaaactacttgcagagctgaggaggcaggagactagagtacagagagcattttagttctatcacaaaggtctagaactgtctctacagtcacaggaagaaacaggtatggcaccgtggccagaagggggtaggtattcacagagagtgggtatcaaggtgtcaaactttgtcttctgatagttttccagagattcctgtagagaagggagcagggagagcctactatccgaaaccattccctgaaccctctgaattctgaagcatgtggatttctcagtcttgttctacccatcccctttcccagctttctgctccttcccactcacctttccttccccctggccattttcttcctcatcagagtctaaaaccaagtcccctatggtaatgacggagctgcacagagacggaggacacactgtaggagggaaaccagaatcaaactactacttctagatgaacacaggctcttgagagtccccaagagaggaggctgttgatccaatcctgactcagactacctacctggcttcctggccctaggaggtaataatgatagtctcagggggtccatgtagcaatccaagcaattcctgaggtgagagcaagcaaagaggataggatgaagggaaggcaggcaaagaatgtgctcctagtaagaagcaactctgttccactcactccttttgctctgtggcaggcaagtcaactgggttctccttcagagcccttccccccagggtctggcatggactcttagacttcccagtggaggctgctcttgtgcccatggctaggtctgctgtgtatatcgcatgttcttccttgctctcaggcttagatatgacctgggttggtgagccgagattcctaaagggaaacagcatgactgtggggcgctccttatggcctcccctagtggaggcccattgggactgaactcttcgtcggcctagaggggccagattgaagtgtcggccagctagaggttctgggtgcgtccttgaagatggtccctgaggaagatgtgtgccaggcttggcttttggcaggggattgtggagtgctagtctttgttgctgaggaggattctgttccatgggctcagccaggttcactgagtcagtaacagagcactctgaaaaagaaaatgaggccccttataaagagaacagatagtaacagaataactggtttcttatgcccggagcccatggaactattccagtggactgcctcaaaaggtctcaggctaaacactacacctccaaattcctagtacctggaagcagccaccccatgtccacaccatattgtctccaggcaagagaagaggtgatagagactccaggctgcatccaactcagcacatcctgaagctgtgggcagggacagaggtatgaagaccacaatccttgaaacagccaccccacactctgcccttacatgttttgccccagcgaaacctgctgtgcctgcggtgtaggcagtgctttctccagctgacacaagtactcaaaaagcagcttttccatggcagccagaaagggttccccatactcttgttcaagttcctacagcaggggagattaggtcaaaagtgggttagtggccaggcacggtggctcacgcctgtaatcctggccatttgggaggccgaggtgggcggatcacttgaggtcaggagttcgagaccagcctggccaacatggtgaaaccccatctctactaaaatacaaaaattagctgggcatttgtaatcccagctactcgggaggctgaggcaggagaatcgcttgaacccgggaggcagaggttgcagtgagccgagattgtgccactgcactccagcctgggcgacagagcaagattcctcaaaaaaaaaaaaaaatgggttagagaaaatagccacataatagccttcaaaccagtctcacctgcagcttcgaggccaaatccacaggagcctctgacagctgcttcacctgctggtaaaaagtttcctgtgcctccaaaatcttcctcagatcctgctttgtctgttgaggatacagaagacagagaagttagcaccaacatccagtagacaggaggagcaactttgctgcaccaagtgtaactggggtcagggcttgttccggggattactcacagccttgggatcccgcactataggtccagattctggaaagtggtgattcagggctttcaggacttgggcccaaggccggccctgcaggatcagctccaccaccacctgtacggtactgaattcagaatccccacttcggggcaagctgaccttttccaactagtctcatccccaagctgtgggcccttgtcaggtgctcgcatcccgcccctttctttctttccccttccaggtcctacttgctccaataccttggcctttaggcccatacaaaggcgttcgtggtgccggtagcgaaccaagccaggggcaacagcgcgcagagatcgcagaaactccagtactcgcggaaaatgttccacgcagcgtccgcgcacaacctgccagctagccgcggcggcgaagcgtagagctgcgggacccgccaccaggggcgtagccatggtcggcgggctccgcccggaggcggtccctccgggttcctcacccggatgggtgaggctttccgatcactcctaggggcggggcttctggcaactccctgtcgctccggtctgtcggctctgggtacctcgcgatctgactcggctcccttccatcggcccccagaattctgggggagggggtcttctggctcgggctggaggagcctgagtggagaagctgaccgtctccagtggcactgggtcgctcagctttaaacgtcgccgctgtctcgagcccgagggtgcctcacttccggctccgctactagcttccct

SEQ ID NO: 631 - DNA, 3903 bp, Homo sapiens
aaaaggggtcagatatggtagctcacggctgtaatcccagcactttaggaagatgaggtgggaagatcacttgaccccagaagttttagactagcgtgggcaacacgatgagaccgcatctctacaaaaaaataaaacaattggctgggtatggtggtagcacacgcctgtagtcccagctactcaggaggctcagatgggagaattgcttgggcctgagaggtcgaggctgcagtaagctgtgatggcaccactgcaccctaagcctgggcgacagagtgagaacctgtctcaaaaaaaaaaaaaaaaaaaaaaaggaactgtaataaaaaatgtcacttatatggtaattaacagctcttttttttcttttttaaattaatattttcttcagatcagattaacagctatctcatgtgtaactactttcctatgtatttaattaagaaatgcaacaaacaagaggggatggggcgagagggggagatagagagagatggggcacagaggcctgtttgaaggcagaagggtgttgcaggaaagaagactggcaattttagagaagtaccacataaatatggattcaaagaaacagaaaaaatctagaatcttgctattcaaagtgtagctctcagacattcaatatcacctgggagtttgtgagaaatgcagaaacctgtgccccaccttagacccacagaatcataatcagcattttagcaagaccacaggtgataggacactgtattttcaagtttccacacacagcattgatttttttgttcaaacagttattttatttatttattttttgagacagtctcactctgttgcccaggctggagtgcaatggcacgatcttggctcactgcaacctctgcctcccaggttcaagcaattctcctgcctcaccctgtcaagtggctgggactacaggtgtgtgccaccacactcggctaatttttgtatttttagtagagacggggtttcaccatgttggccaggctggtcttgaactcctgacctcgtgatccgcccgccttggcctcccaaagtgctgggattacaggcgtgagccaccacgcctggcctttcaaacagtactttttaaactgcaggtctcaacccatcagtgggcaggtctcaacccatcagtgggttatgaaatcaacttagaattgaaagtctgagagcatatcacaaatagcaaagtttttgtgccttatgggttgtgacataaaatttcttaatgtggagtgaaattttcaaaaagtgtacaaaacacttagcattagtaacttaacttctttggacctagtggacatgagaacccatatgcattgaaaagccaacagaagtattcaacaggccgggcgcggtggctcatgactgtaatctcaacactttaggcggaggtgagcggatcactaggtcaagagatcgataccatcctggccaacctggtgaaaccccgtttctactaaaaatacaaaaattagctgggcgtggtggcacaccctgtagtcccagctagtcaggaagctgaggcaggagaatcgcttgaacccgggaggcggaggttgcagtgagccgacattgcgccactgcactccagcctggtgacagagggagactccgtctcaaataaaaatattcaacagttagtgtttctcaagattttgacagtgatccattctaaaaattagtatgaactagtaacaccccctgtgtaatatacatataaaataaaataaaaaatttcaggcctggcaacagagtgagactctgtctcaaaaaaaaaaaaaaaaaaaaaaaaaaaggccaggcacgggggagggtggctcacacctgtaatcccagcactttgggaggcagaggcgggcggatcacgaggtcaggagatcgagaccatcctggctaacatggtgaaaccctgtctctactaaaaatacaccaaaattctcttttcttttttacattcacctttataccccatcaacctctttattcttattccttctcctttccttccccctttattctaatatttcatttatcctatatttctccacttccctccagcctttacaacagagctatactctttctcaaaaaaaaaaaaaaaaaaaatcataaaacaatatccttacctagcactatattatttcctattttctccccctctctctttcttttttttttttgcagggggagatggagtttcactcttgtcgcccaggctggagtgcaatggcgccatctcagctcactgcaatctccgcctcccaggttcaagggattctcctgccttagcctccgagtagctgggattataggcgcccaccaccacgcccggctagtttttgtattgttagtagaggcggggtttcaccatgttggccaggctggtcttgaactcctcaccttaggtgatccacccacctcggcctcccaaagtgctgggattacaggcgtgagccactgggcccggccttttttttcaggcagggtctggagtgcagtggtgccatcactgctcaccgcggcttcgacatcccaggatcaatcaatcctcccatctcggcctcccgaatagctgggcctacaggcatgcgcccagacccttggctaattttttgaatttattgtacaggcagggtttcgccatgttgcccaggatggtctccaactcctgggctcaagcgatcggcctgcctcggccttccaaagtgctgggattacaggcgtgagccaccgcgcccagcctattttctctttttaatggcgccagtgacccattcacctattaaattgatgttacgactcttatataggccgctactcaacgttaaaaaaaatcatctttaacatactattttaatactagacctcaaatcttagctaagaagtagtttggaaggactggggaagagaaggttaagaatgactattatgtacggtaaatatgctaagaagctgatgaaataacgatagatttacttagctacaaaaaggccaaactagcattagacttcacttgtcagcagttttgtttttttgaggggggcgtgggggggggggtctctgtctgtctgaaggcacaaaagaggaaacagcagataggactaacgagggctggaaattggtgaagaaccaccacgggagttgagagatgcagatgaaggaaaccatggctagtagcaagaactagggcagcggtaactaacctgcctcagccaaggaagtgaggctggtccaggatgccaggctcagaaaggcaggtactgactgaacacactccccgctttggttcctgtaggacgggtgagataccacaccttggcaaccaccagtaaaggctcatagtctagcccttgggaggccccgattttagggctgtgctcggaggcgacctacgttagggactgggagaagcaggtaccctgggaatgaagaatggagagcagcgcttactccaagaatctgagagacgggggagtcaagccgctgctaggccttctctatgactgcgggggttcgaatacagtgagacccgacaaaagcgaccccattctgggtgatagcacagtcctggcaaaaaagcaggcatggcaaaataccccagggtcgtcaggtgggacctgggccccgctctcaaagcccttctgggtccccctatttcccaccacccctcgcgcggagccctgaggcagtcagcgtcctccaggctagggaaaggcgtggttttccttccccacgtctcccgtaaggcactgctgccagcccagtactactgcgtcttggcaaggctggaggtgctcccaccttcactttaattagcatcttctttccagtttggggctgcacacggataaattgctgctcctaccgctccggtcgccg

SEQ ID NO: 632 - DNA, 6573 bp, Homo sapiens
gtgacaatggttctaaaatccaaaactttgtattagaatgggatgaagtaagtaaattgaatctttttaaatggttaacattatgtgcatatgttcaggcaaaattaacttttttgtttgttttaatcatcaagtatattcttctgtcaaaaaaagtatgaatgattttgtgtggtgcatgagtggattgatggtgttttcagaaaacattcctgacttaacttccctattttcaataaatcaccatcaaaattattatttaggtaactaccttgataaaggaacttttttttcacatcagccttaaagacaagtgtattcctttcctatggctgctataacaaattaccccaaacctgacattaaaacagcacattattctcttacttttctggaggccagaaatccaaaatgagtttctctgggacaaaatcaaggtgtcagcatggccaggccctctccagggactttagaggagaatctgtttccttgccttgaccagcttctgtaggctgtcctcattacttggttcatggccacatcacattgcgttttctccccttgtttccatcatcacatcaccttcctcctctgtcttcaaatctgtcttccttttttaggaacacttatgattccatgtagggtctattcagataatccaggataagctcctatctcgagattcttagtcacattgtacagtcccacctaccatataaggttatattcacaggttcaggggattgggacctggatattcatggtggccatgactcagccaaccacagcaagcatactggacttcattgtttagtacaggggtgtccagtcttttggcttccttgggccacacaaaatactacatttgtgcaaaggtagttgctgtttttgccattaaaagtaatggtaaaaacagcagttacttttgcaccaacctacattaacactaacaatagctaatgagcttttaaaaaaatgacaaaaatatctcataatgttttaagaaagttaacaaatttatgttgggccacattcaaagctgtcctgggccgcatgtggcccttgggccgcaggttggacaagcttggtttagtacattgtttttactatcagttaccatgttctctcttgccctatggcttgtaccaagctaagaagaggggccagagggagtggaagaaattccattgataagttgggaattcggcagtatattaaaagaataataaagcacaaccaagtagattttattccggaaattctaagataatttagaattaggaaacctattaacatatcacattaatttagaagaaaactatattgctaaattaaggaagagtatttgataaaaattaccattcatctcagttaaaactcaaagcagattaggaatagaaaggtaatttcttacttgatagttatttttgtaccatcactaaacaaaggcatttttatgcaaagctgaaataagtcaagattgccaattatccctacctttatttaacattatttcagaagttacacttaaggcagtatgacttgaaaccaaagcaaaaagtacagtcatggtgtctggctcggggcaaaactgtcattatttagagatgatatgattttctacttagaaactcagtcgaatcaactaaacaacatcagaactaaaaagagcatttagtaaagcagtcaagtacagtctacaggttttctttgaagcagaagtcaccctaactaccattttatctctagcaacacaataaagaaaaatgggtggcaaatgtgaaacttacccattttagttaccactctaaatttctaaaactctttagttgtcctcttttctctctccttcttattgcctgtaattgggctgtgctctctgctagaacattttcagtgttaatctaagcagtagaagcgccaaaagttttattttaaagaagtttatgagctatctagttggaagtttgggcatgggtaaggaccttttcttaaaactgtctgcttagagctttccataggttgaaaaaagccgccagttgaccctatcaaagatcgtcaccccatttctaccactggtagtcttctatggagattgtagggtccatacctgcagagtttcctttattaaagccagagatttaacattggctaaaagatggtacttaattcaagaagctgtacaaagatacctgctctctggtgttttaattctgcatttgatgatctatatcatataaaagatgtgctgtatctcagccttctcttgagatccatgacttttagtatacacttgctaatatgtaactgtcaagaaggaattgatgcgaatttatctttttacagtaatgtacatggtatataataatcagccatttcttgtagggaaaaggaaatggagaattttgtcagtgttacatgggctcacagaaacaatttaaaattactaaactttcaccagcaatgggctgtaaattcagactatcggccagaaatgactatggtacaaggtaaggtgtactttataaaagaatgtaaatatttttagattatcaagtcaacgtcaattgtataattatttactgtccaaattattcattaaaaattctgcttagtttatctctttgttgatatagttaagatgtgttaccagtctagcaaaagctataagagagttagttacataggaaccacaggaaacattaaacttacaactttccaagattttcagatataaattagatttttatatgtgacaaagagatttttcttttgctcctcagcatatgtgatgacagtattttgtttaaagtcaggtgaactgtaagaacatctaaaatacccaatttaaatagaaaggccaagtatctttcaagagtcattgaaattatttttgttctagagatagctctgctcaccttaggggcaggtgcgtttaattacacaactgagaacttacattttctattttatataaatggcattatatgaaagtgtgtttaaaagttacaacatttacaccaatacacgagtgttattgtttccataaggtaatgtgtatattttttcattgactcgataaattatgatataaaggcttacaaatctgaacaaaactgcatttttaatagaacactaattcactgtttggtatctgacctggttatcataaagagatcaaacccaagatatattatttgtattataattcattatcaaaacttgtcattttccaaaaaaattacatctgtcacaaacttgttctttcactgtaaaaataactttttcatgccttttaaaaccatttgtttcaacagtggttttagtgaagaagtcttatattacacctcaggctgtgctccttctatgccagcaagtcctgtattaaccaaggctggaattacttggttatccttacaatggagtaagccctcaggaacaccatcagatgaaggaatttcttacattttagagatggaggaagaaacttcagtaagtgcaaatatggattttaaatagtgtatttaaaacattttcagcttaaggagattttgggctgagacgatggcattttctaaatatacaatcatgtcatctgcaaatagagacaatttgacttcctctcttcctatttgaatacgctttatttctttctcttgcctgattgccctggccagaacttccagtactatgttgaataggagacgagggcatccttatcttgtgccagttttcaaagagaatgcttccagcttttgcacattcagtatattggctgtgggtttgtcataaacagctcttattattttgagatacattccatcagtacctagtttattgagagtttttggcatgaaggggtattgaattttatcaaaggccttttctgcatctatcgagataatcatgtggtttttgtcattggttctgtttatgtgatggattacgtttattgatttgcatatgctgaaccagccttgcattcctagggatgaagccaacttgatcatggtttttcgatgtgctgctggattcaatttgccagtattttattgaggatttttgcatcaatgttcatcaggcatattggcctgaaattttcattttttgttgtgactctgccaggttttggtatcaggatgatgctggcctcataaaatgagttagggaggagtccgtctttttctattgtttgtaatagtttcagaaggaatggtaccagctcctctttgtacctctggtagaatttagatgtgaatccatctggtcctgggctttttttggttggtaggctatgctggaaaccattattctcagcaaactaacacaggaacagagaaccaaacactgcatgttctcactcacaagtgggaactgaacaatgagaacacctggacacagggaggggaacatcacacagcagtgcctgttggagggtggggggttaagggagggatagcattaggagaaatacctaatgtagatgatgggttgatgggtgcagcaaaccaccatggcacatgtatacctatgtaacaaacctgcatgttctgcacatgtatctcagaacttaaagtataattttttaaaaaatcagaaaaaaaaacattttagtgtggcattaatcctaatacaataaatattgccactcctaatacagtaagtattgccacagtagttagctcatttcccagtcctttgaagccttggcttgttactgtttgggagaggttaggtatgatggagaactcagtctttttttttcttttgcaacagggtcttgctctgtagcccaggctggagtgcagtggcacaatctcagttcacttcagccttgaactcctgggctcaggcaatcctttcacctcagcctttcaagtagctgggactacaggcacatgccaccatgcctggctaattttattttttgtagtgacagagtttcgctatgttgcctaggctggtctcacactcctaggctcaagtggtcctcccacctcagcctcccaaagtgctgagattacagacttgagccactgtgcccagcctgaaaactctgtcttttcttttgatgtgaagggggttttgttttatttgtgtgtgtgtatatatgtctgtctgtgctttggaaccacataggctgcactttaactatatctgttttagggaaactatgaggaggggaagatcaccacagccttcttgactaagcagctctaaaagatgaggaaatattgggtctgcctttctctaactgtatttatacactgcttcccaaggtgtcacagaagattttaaaagtttcctgtgaaactgtagtacagcctgaatctagttacacatcactgacatcctattacctagaggctagctgaccaggagttagggtgtattctattattaaatctatatatagttcatagattttcagagctactttgaaggaatatgggtcaaaaatggcattggtccacccctaagtatatacccaaaagaattgaaaacacatgttcatacaaaaaaattgtacacaaatgttcatagcagcattattcataatagtcaaaaagtggaagcaacccaaatgtccatcaacagatagatggataaacaaaatgtggtgtatccatacaatggaatatttttcagccataaaaagagtaccagtatatgccacaaccttgaaaccaaccttgatgacctatatgaaccaaccttgaaaacattatgctaaagaacccagttacaaaagactccatattatatgattccatttatatggatatagacaaatccatagagacaggaagtatgttagtagataggtggagggaagtgactgctacccaaaaaaggacaggctttttctgaaattaggaattaggggaaagttgcacaactttgtgaatacactataagccattagattttatactttgaaatggtgaattttacagtatatgaattatatctcaatttttttaattcaaaaaatgataacgttcggaaaatttgtaaagcattgtcactagtgctggaaatagccatcccaaacctaagtgacatcctcacctgccagcacaattaacccttcaattatttacttagacaaccatgtgttaaaggcaagttaaatatgttaactacttacagttctattcagctcttgcacgatgtctctgggaaatctctgttcttgggatagcttactgatggtgaagttaccattggctccaactctataaactcttccctcaacacaaagatcgtcttctcttggctactatatttactgagactaagtggcctgcttcatcttctaccaaatgttcaataagcatttccgggtctacccactgaagacagaagcatcgaggtgaggattccactcaacagagcattagtcatattgcacatagtagaagatgaagagaaacccgggtcttttcacatattcattattgcccatatttctattgttagacatcgaatgaagactttgttttttccttttccagggatatggttttaagcctaaatatgatggagaagatcttgcttacacagtgaaaa

SEQ ID NO: 633 - DNA, 539 bp, Homo sapiens
ggttttactgctcctgagcaccctcccaatggacacagctaggaactatatgtgtgtatatgtttagtttatatacagatatttatacatgtgtatatacataaatagacaattacaacacagatacatatctgtgtctctgtatctctgtatttttaaaaatcatgagttcacaccagataccttcaattctaatccagtgccacaggttaattttagttttcccctgtccttatttctaacttccttcatcatcagtgagaaactttgctcattagttgataaattcaacatttaaattttcctgccagtgcttatttaatcaaaccatttcaaataaatgataaaagccactgtaaattgttttcactattaaaaagcaaagaaattttattacttcttgagaatcttaagtctttagcaatgggaaatttgattatttagcacataataattgttatgctttattttatgctattagcttcattttaaaaacttataataatgctatgtcaatttaatttctaaatatgattttc

SEQ ID NO: 634 - DNA, 510 bp, Homo sapiens
atgactttgtgatctgggatgatttatttggttctttgaagccctcattttctcttttgtaaagttcaggtaatagtacttcatagagttgattggaggactaaatgagataaggtaaaacactttacacttaatagtatcccctcaaacttggagaaaagctagaggatcagtcttaggttaaggtggacattttaatagcctcactggaaaaagagaaaaattaatcaagtaagtgtgagagacctcagcaactagactagagcaatctggagtcattaacacttggaaaatgtctttttatatccctcacttcctgctgagacttttgatctctctctttggattctcttcctctatatcataagagctggagtttcccaaagattcttcctctgccccgttcacattatattcatttttaactgccactactttgccagtcagtgagatattaccctaacttacaagcaaattctggccatgctaaccagtttaaaattataattt

SEQ ID NO: 635 - DNA, 2693 bp, Homo sapiens
tagagttgcctcactcacagagctctccaactgtcagcagcacctgtactaaagtgctctatttcactgaccggtcacttacgcccttcatggtcaatataccaaagaggtgagattctgggatcattgtatttcactgtaaagaaggaaaggaaggcagaacctcattagttactgcccacatgagcagctgaaaggtgtttgagaagcagtatagtgagatctcactatagtgagataagccagagagacagattctagtttcagctttgccactattcagtggtattataaaggacaagtcatgatctactactagatacaggtacaataatagtacttccaatcctgataactatgcaaatatggctctgcatttgggaaaatcttttttttttcttttaagtgttcaaaatagctcctgctgatacaatggattgcagcctggcactcactccaggactatgactaattgatctttgttactattcaatgactgcagctaatccctattgagaaattatgtcaaaaaccttccagaaagttaatgtgcttccttttaagggaaatggttttgaaatagaaatatttaaactctgcaaccaactattgagagaggttataggatttttcttacttagtctgcttatttagtctgggttagaagccagcttcctaaagatagagggataaagatcatgatacttgatttgattctaccatcctagagaattgggatattgtagcaaagaagaaaatcaagagaactttgatatatttatggttattcaacaaattttatttcagggactttatatcttatttccagagaaaagtgatttggcttctgaagcaataagtcaattttaaattctcacatcaccccatatttaatactgttttcattccctagtgatgactggttctccagcctctgctgttttagtcatctgggttatcggggcagtgacctaacaaggggctatttctgcttattgactttggcagggggctgtgtttaaagttaacatcttatctttccagctattgatcaacagtctattttagtgctctctccttgtgttgcaggttggaggaggtgacgttaaaggattttaaagcagctattgatcgggaaggaaatcaccggtatcacttcaaagcactggatcctgagtttggcactgtcaaagaggaggtaaagaatctgtggggagtctgtatggtattattggtcctttctgaaccctgaagcctcctgttcaagcactagtgtccagaagtacatgagttccctgactaggtcagaagaatttgccagagcctcagaccatggtctgattactctagacaagtggtcatagaatagtccaagatgctgataggttctttagttgtaggacttcatcatttgactgagaacttggatataatttttattttaaattattttgttagggaaaataaagaacctaagacaataaataattttccatctgcagccaaatcttagaaaacttcttgcttcctatgtagagcaaaataaacacgcatggatatatggaactgtgtatttctcataatgaaatcaaggaacttctagggagttatgtatgcttatgcccaactccttgagtaagtattttcttagcctacgtgtctctttataatccatttgtcaaagatagacttttgggggaatacagttctgggttatatagtattacaagtggattcactgcagttacagaatgaaaaaagttattatagagaaagtaaaattttattttgtaaacatttcctcagtgaaatgttttagtaaccctgttttattagtggcttaggaaatgagttgaatgaattaatgaaaataactgcatctgagaaatgtgttaaaatgagtcttttttccccaccctttctttacattgcctggtaactaaattttccactttctcatttttaaaatacttaacactacatctttcctctaagaagcccaaagtactttgtgattggtaatttattaattcttacaaatctctatgagcaaagtagtatcaggcattttttaaaaccatttcatagatgtggatctaagaaaaaaataaaatatcagttgcagttctagggacaagaccaaaaggacatagactcttaactcaaggctttcttctacatggttgaggtcttatttttattagcagcaattgtttagtgaatgagattccctgttttttcattgtggctttttgtttttttctctagattttccatgatgatgatgccatccctggatgggaagggaaaattgtagcttgggtggaagaagaccatggagagaattaatgccaagtatcagattgagggcttatggaacctggtcactccctggctgcttcactcaggaaagggaactaaaaccagaatacactaagaagtttctagtttgtgtgccaaaacagaagcttctccaagcatgatggccacaggtcagtcctctttctgtgcctggcatatctggtacttaaaattctgtccaaatgtagaccatgggttcatctggagttccttgtccgtgggaacacagtgttctattctactctgaggacaacaaaccgaaggccttaaacgatggggatggatgatcccgcctctgtaggggcatggctgctattatctggaaattagga

SEQ ID NO: 636 - DNA, 1584 bp, Homo sapiens
cctaatttccagataatagcagccatgcccctacagaggcgggatcatccatccccatcgtttaaggccttcggtttgttgtcctcagagtagaatagaacactgtgttcccacggacaaggaactccagatgaacccatggtctacatttggacagaattttaagtaccagatatgccaggcacagaaagaggactgacctgtggccatcatgcttggagaagcttctgttttggcacacaaactagaaacttcttagtgtattctggttttagttccctttcctgagtgaagcagccagggagtgaccaggttccataagccctcaatctgatacttggcattaattctctccatggtcttcttccacccaagctacaattttcccttcccatccagggatggcatcatcatcatggaaaatctagagaaaaaaacaaaaagccacagtgaaaaaacagggaatctgattcactaaacaattgctgctaataaaaataagacctcaaccatgtagaagaaagccttgagttaagagtctatgtccttttggtcttgtccctagaactgcaactgatattttatttttttcttagatccacatctatgaaatggttttaaaaaatgcctgatactactttgctcatagagatttgtaagaattaataaattaccaatcacaaagtactttgggcttcttagaggaaagatgtagtgttaagtattttaaaaatgagaaagtggaaaatttagttaccaggcaatgtaaagaaagggtggggaaaaaagactcattttaacacatttctcagatgcagttattttcattaattcattcaactcatttcctaagccactaataaaacagggttactaaaacatttcactgaggaaatgtttacaaaataaaattttactttctctataataacttttttcattctgtaactgcagtgaatccacttgtaatactatataacccagaactgtattcccccaaaagtctatctttgacaaatggattataaagagacgcgtaggctaagaaaatacttactcaaggagttgggcataagcatacataactccctagaagttccttgatttcattatgagaaatacacagttccatatatccatgcgtgtttattttgctctacataggaagcaagaagttttctaagatttggctgcagatggaaaattatttattgtcttaggttctttattttccctaacaaaataatttaaaataaaaattatatccaagttctcagtcaaatgatgaagtcctacaactaaagaacctatcagcatcttggactattctatgaccacttgtctagagtaatcagaccatggtctgaggctctggcaaattcttctgacctagtcagggaactcatgtacttctggacactagtgcttgaacaggaggcttcagggttcaaaaaggaccaataataccatacagactccccacagattctttacctcctctttgacagtgccaaactcaggatccagtgctttgaagtgataccggtgatttccttcccgatcaatagctgctttaaaatcctt

SEQ ID NO: 637 - DNA, 2693 bp, Homo sapiens
tagagttgcctcactcacagagctctccaactgtcagcagcacctgtactaaagtgctctatttcactgaccggtcacttacgcccttcatggtcaatataccaaagaggtgagattctgggatcattgtatttcactgtaaagaaggaaaggaaggcagaacctcattagttactgcccacatgagcagctgaaaggtgtttgagaagcagtatagtgagatctcactatagtgagataagccagagagacagattctagtttcagctttgccactattcagtggtattataaaggacaagtcatgatctactactagatacaggtacaataatagtacttccaatcctgataactatgcaaatatggctctgcatttgggaaaatctttttttttttttttaagtgttcaaaatagctcctgctgatacaatggattgcagcctggcactcactccaggactatgactaattgatctttgttactattcaatgactgcagctaatccctattgagaaattatgtcaaaaaccttccagaaagttaatgtgcttccttttaagggaaatggttttgaaatagaaatatttaaactctgcaaccaactattgagagaggttataggatttttcttacttagtctgcttatttagtctgggttagaagccagcttcctaaagatagagggataaagatcatgatacttgatttgattctaccatcctagagaattgggatattgtagcaaagaagaaaatcaagagaactttgatatatttatggttattcaacaaattttatttcagggactttatatcttatttccagagaaaagtgatttggcttctgaagcaataagtcaattttaaattctcacatcaccccatatttaatactgttttcattccctagtgatgactggttctccagcctctgctgttttagtcatctgggttatcggggcagtgacctaacaaggggctatttctgcttattgactttggcagggggctgtgtttaaagttaacatcttatctttccagctattgatcaacagtctattttagtgctctctccttgtgttgcaggttggaggaggtgacgttaaaggattttaaagcagctattgatcgggaaggaaatcaccggtatcacttcaaagcactggatcctgagtttggcactgtcaaagaggaggtaaagaatctgtggggagtctgtatggtattattggtcctttctgaaccctgaagcctcctgttcaagcactagtgtccagaagtacatgagttccctgactaggtcagaagaatttgccagagcctcagaccatggtctgattactctagacaagtggtcatagaatagtccaagatgctgataggttctttagttgtaggacttcatcatttgactgagaacttggatataatttttattttaaattattttgttagggaaaataaagaacctaagacaataaataattttccatctgcagccaaatcttagaaaacttcttgcttcctatgtagagcaaaataaacacgcatggatatatggaactgtgtatttctcataatgaaatcaaggaacttctagggagttatgtatgcttatgcccaactccttgagtaagtattttcttagcctacgcgtctctttataatccatttgtcaaagatagacttttgggggaatacagttctgggttatatagtattacaagtggattcactgcagttacagaatgaaaaaagttattatagagaaagtaaaattttattttgtaaacatttcctcagtgaaatgttttagtaaccctgttttattagtggcttaggaaatgagttgaatgaattaatgaaaataactgcatctgagaaatgtgttaaaatgagtcttttttccccaccctttctttacattgcctggtaactaaattttccactttctcatttttaaaatacttaacactacatctttcctctaagaagcccaaagtactttgtgattggtaatttattaattcttacaaatctctatgagcaaagtagtatcaggcattttttaaaaccatttcatagatgtggatctaagaaaaaaataaaatatcagttgcagttctagggacaagaccaaaaggacatagactcttaactcaaggctttcttctacatggttgaggtcttatttttattagcagcaattgtttagtgaatcagattccctgttttttcactgtggctttttgtttttttctctagattttccatgatgatgatgccatccctggatgggaagggaaaattgtagcttgggtggaagaagaccatggagagaattaatgccaagtatcagattgagggcttatggaacctggtcactccctggctgcttcactcaggaaagggaactaaaaccagaatacactaagaagtttctagtttgtgtgccaaaacagaagcttctccaagcatgatggccacaggtcagtcctctttctgtgcctggcatatctggtacttaaaattctgtccaaatgtagaccatgggttcatctggagttccttgtccgtgggaacacagtgttctattctactctgaggacaacaaaccgaaggccttaaacgatggggatggatgatcccgcctctgtaggggcatggctgctattatctggaaattagga

SEQ ID NO: 638 - DNA, 2693 bp, Homo sapiens; identical to SEQ ID NO: 637

SEQ ID NO: 639 - DNA, 2336 bp, Homo sapiens
gtaatttagtaagaccttgggctgcctcttctgtcttaactggttctgcagcttgtccttttgcccacatagggcctatttcatgtactgttagttttctctggggactctttaactttagagccatttctttttcttcaaactgatgaacttttgtttgaaaggcataaggagtgaaaagctccttgaaaatccaggcgggtatggaaaggtgctgctacccatatctttttgactttctttgtttcatgactttaactcatggcatctcctttgtagtaaaaggagacagaccattaatttcagcatttctttgtgatttataagtactgagcatgaagtacttgtctgcccctcatttcaaggccagagttattttctatttatgtattagtctaggctgatcttttagggcacaatagaaaccatggggcgtggagcatgagttgtgaatggcagggatcattctgggtaaaaaaaacctagaatcatttctgatgtgcaacattgtcaagtgaagaagctaacagttcaactaccgagattatttgataacctgggttttctcattcatccatcaagcaccatcaaccagtcagccattattatttatatatgtattaccaaaagcagtctatctgcctgtgacctccaatgtacactgccaaacacaagagtaggacacatctgttctgggttcttgacctatctgtctccaattcatctccccttttcagccatttcaacaaactactctttggagctctgagatgacatcttgttgttttatatagatgtatcttttaaaaatagttcacgtttggagaattcttttgtactcatttgctttttgtctgagaaccatgtctatttttataactggagtgtgagttctgtatcttctcacattctgtatactgtatccattttctagagaacccagtagcttttatacagtctcttcttaccaccccttgtggtttcagaacaagctttattttattacgagtatattaatgacaactaattcctgttccaattctacctgttttagttgtgaaggtagttttgtgtaatccagttgattgctcctctggcagagagaaggagctcaaaagatacttgatgtctttcatgtaagtttacctggtcttttcctattgaagaatttttcatcagaaacgactgggaaagtttgggaaagtcagcaaaagaaagaatgcatttcgaaagcaaacagaagaaaaaagtatattctcacagtttttccccaggaagtctggagaaaaagtcctcatgtcaccaatttctctgttgcatgaattttagtgttttgctataagacagcatgagggctatcaggccaaaattcattattgtatttccaatacagtttgtcttgaatgtctgtctcttaaaccagtttttacttgtcagttttctctcagcaaacagtcttactattatgtggaatttaacttttcagagaaaatttccaaagtcctctaccttatttggcttttatctgtgtcttttggaaaaggagctgcatggcctcagtgcctccataaaaagcttaagttgagttcatgggagaacattaagatcgttttttttcccttttagctcggtaatctcatgtaccacaggtaatgaccaagcatctctgctagaggatgtaactctcataactcctgtgtaaaatgaggatcctgttggtgatcctcattccagtttccaaagcgagaggagccttctgagcagaagtatgcaagactgattctgtttggaacagtttcctatttggctgcattctaggaggcctcctgacttattcatagtattgtcgcctggtggcattggtgtggggtagcttgtcctgctacttgctaaagttctctttctttgagaaaactgaggaaccagaatgcttagagttcataaaataatctctaaaccatgttaggttaaaacaaaatgaccatctcacaaaaacgagtttagttgaatgctcaattccttacaaaatcttcatttaaggctgagtgtggtggctcatgcctgtaattccagcactttgggaggccgaggcaggaagactgcttgagcccaggagttcaagaccagcctgggcaacgtaggaagactccgtctctacatagaaattttattataaaagtagctggggatggtggcacacacctgtagtcccagctactcaggaggttgaggtgggaagattgcttgagcccaggagtttgaggttgcagtgagctgatcatgccactgcactctagcctaggctacagagcaggaccccatctccaaaaaaaaaa

SEQ ID NO: 640 - DNA, 2299 bp, Homo sapiens
gtaatttagtaagaccttgggctgcctcttctgtcttaactggttctgcagcttgtccttttgcccacatagggcctatttcatgtactgttagttttctctggggactctttaactttagagccatttctttttcttcaaactgatgaacttttgtttgaaaggcataaggagtgaaaagctccttgaaaatccaggcgggtatggaaaggtgctgctacccatatctttttgactttctttgtttcatgactttaactcatggcatctcctttgtagtaaaaggagacagaccattaatttcagcatttctttgtgatttataagtactgagcatgaagtacttgtctgcccctcatttcaaggccagagttattttctatttatgtattagtctaggctgatcttttagggcacaatagaaaccatggggcgtggagcatgagttgtgaatggcagggatcattctgggtaaaaaaaacctagaatcatttctgatgtgcaacattgtcaagtgaagaagctaacagttcaactaccgagattatttgataacctgggttttctcattcatccatcaagcaccatcaaccagtcagccattattatttatatatgtattaccaaaagcagtctatctgcctgtgacctccaatgtacactgccaaacacaagagtaggacacatctgttctgggttcttgacctatctgtctccaattcatctccccttttcagccatttcaacaaactactctttggagctctgagatgacatcttgttgttttatatagatgtatcttttaaaaatagttcacgtttggagaattcttttgtactcatttgctttttgtctgagaaccatgtctatttttataactggagtgtgagttctgtatcttctcacattctgtatactgtatccattttctagagaacccagtagcttttatacagtctcttcttaccaccccttgtggtttcagaacaagctttattttattacgagtatattaatgacaactaattcctgttccaattctacctgttttagttgtgaaggtagttttgtgtaatccagttgattgctcctctggcagagagaaggagctcaaaagatacttgatgtctttcatgtaagtttacctggtcttttcctattgaagaatttttcatcagaaacgactgggaaagtttgggaaagtcagcaaaagaaagaatgcatttcgaaagcaaacagaagaaaaaagtatattctcacagtttttccccaggaagtctggagaaaaagtcctcatgtcaccaatttctctgttgcatgaattttagtgttttgctataagacagcatgagggctatcaggccaaaattcattattgtatttccaatacagtttgtcttgaatgtctgtctcttaaaccagtttttacttgtcagttttctctcagcaaacagtcttactattatgtggaatttaacttttcagagaaaatttccaaagtcctctaccttatttggctttatctgtgtcttttggaaaaggagctgcatggcctcagtgcctccataaaaagcttaagttgagttcatgggagaacattaagatcgttttttttcccttttagctcggtaatctcatgtaaccacaggtaatgaccaagcatctctgctagtaggatgtaactctcataactcctgtgtaaaatgaggatcctgttggtgatcctcattccagtttccaaagcgagaggagccttctgagcagaagtatgcaagactgattctgtttggaacagtttcctatttggctgcattctaggaggcctcctgacttattcatagtattgtcgcctggtggcattggtgtggggtagcttgtcctgctacttgctaaagttctctttctttgagaaaactgaggaaccagaatgcttagagttcataaaataatctctaaaccatgttaggttaaaacaaaatgaccatctcacaaaaacgagtttagttgaatgctcaattccttacaaaatcttcatttaaggctgagtgtggtggctcatgcctgtaattccagcactttgggaggccgaggcaggaagactgcttgagcccaggagttcaagaccagcctgggcaacataggaagactccgtctctacatagaaattttattataaaagtagctggggatggtggcacacacctgtagtcccagctactcaggaggttgaggtgggaagattgctgagcccaggagtttgagttgcagtgagctgatcatgccactgcactctagcct

SEQ ID NO: 641 - DNA, 2026 bp, Homo sapiens
ccacactcagccttaaatgaagattttgtaaggaattgagcattcaactaaactcgtttttgtgagatggtcattttgttttaacctaacatggtttagagattattttatgaactctaagcattctggttcctcagttttctcaaagaaagagaactttagcaagtagcaggacaagctaccccacaccaatgccaccaggcgacaatactatgaataagtcaggaggcctcctagaatgcagccaaataggaaactgttccaaacagaatcagtcttgcatacttctgctcagaaggctcctctcgctttggaaactggaatgaggatcaccaacaggatcctcattttacacaggagttatgagagttacatcctctagcagagatgcttggtcattacctgtggtacatgagattaccgagctaaaagggaaaaaaaacgatcttaatgttctcccatgaactcaacttaagctttttatggaggcccttgaggccatgcagctttcttttgcaaaagacacacataaaagccaaataaggtagaggactttggaaattttctctgaaaaattaaattccacataatagtaagactgtttgctgagagaaaactgacaagtaaaaactggtttaagagacagacattcaagacaaactgtattggaaatacaataatgaattttggcctgatagccctcatgctgtcttatagcaaaacactaaaattcatgcaacagagaaattggtgacatgaggactttttctccagacttcctggggaaaaactgtgagaatatacttttttcttctgtttgctttcgaaatgcattctttcttttgctgactttcccaaactttcccagtcgtttctgatgaaaaattcttcaataggaaaagaccaggtaaacttacatgaaagacatcaagtatcttttgagctccttctctctgccagaggagcaatcaactggattacacaaaactaccttcacaactaaaacaggtagaattggaacaggaattagttgtcattaatatactcgtaataaaataaagcttgttctgaaaccacaaggggtggtaagaagagactgtataaaagctactgggttctctagaaaatggatacagtatacagaatgtgagaagatacagaactcacactccagttataaaaatagacatggttctcagacaaaaagcaaatgagtacaaaagaattctccaaacgtgaactatttttaaaagatacatctatataaaacaacaagatgtcatctcagagctccaaagagtagtttgttgaaatggctgaaaaggggagatgaattggagacagataggtcaagaacccagaacagatgtgtcctactcttgtgtttggcagtgtacattggaggtcacaggcagatagactgcttttggtaatacatatataaataataatggctgactggttgatggtgcttgatggatgaatgagaaaacccaggttatcaaataatctcggtagttgaactgttagcttcttcacttgacaatgttgcacatcagaaatgattctaggttttttttacccagaatgatccctgccattcacaactcatgctccacgccccatggtttctattgtgccctaaaagatcagcctagactaatacataaatagaaaataactctggccttgaaatgaggggcagacaagtacttcatgctcagtacttataaatcacaaagaaatgctgaaattaatggtctgtctccttttactacaaaggagatgccatgagttaaagtcatgaaacaaagaaagtcaaaaagatatgggtagcagcacctttccatacccgcctggattttcaaggagcttttcactccttatgcctttcaaacaaaagttcatcagtttgaagaaaaagaaatggctctaaagttaaagagtccccagagaaaactaacagtacatgaaataggccctatgtgggcaaaaggacaagctgcagaaccagttaagacagaag

SEQ ID NO: 642 - DNA, 2346 bp, Homo sapiens
gtaatttagtaagaccttgggctgcctcttctgtcttaactggttctgcagcttgtccttttgcccacatagggcctatttcatgtactgttagttttctctggggactctttaactttagagccatttctttttcttcaaactgatgaacttttgtttgaaaggcataaggagtgaaaagctccttgaaaatccaggcgggtatggaaaggtgctgctacccatatctttttgactttctttgtttcatgactttaactcatggcatctcctttgtagtaaaaggagacagaccattaatttcagcatttctttgtgatttataagtactgagcatgaagtacttgtctgcccctcatttcaaggccagagttattttctatttatgtattagtctaggctgatcttttagggcacaatagaaaccatggggcgtggagcatgagttgtgaatggcagggatcattctgggtaaaaaaaacctagaatcatttctgatgtgcaacattgtcaagtgaagaagctaacagttcaactaccgagattatttgataacctgggttttctcattcatccatcaagcaccatcaaccagtcagccattattatttatatatgtattaccaaaagcagtctatctgcctgtgacctccaatgtacactgccaaacacaagagtaggacacatctgttctgggttcttgacctatctgtctccaattcatctccccttttcagccatttcaacaaactactctttggagctctgagatgacatcttgttgttttatatagatgtatcttttaaaaatagttcacgtttggagaattcttttgtactcatttgctttttgtctgagaaccatgtctatttttataactggagtgtgagttctgtatcttctcacattctgtatactgtatccattttctagagaacccagtagcttttatacagtctcttcttaccaccccttgtggtttcagaacaagctttattttattacgagtatattaatgacaactaattcctgttccaattctacctgttttagttgtgaaggtagttttgtgtaatccagttgattgctcctctggcagagagaaggagctcaaaagatacttgatgtctttcatgtaagtttacctggtcttttcctattgaagaatttttcatcagaaacgactgggaaagtttgggaaagtcagcaaaagaaagaatgcatttcgaaagcaaacagaagaaaaaagtatattctcacagtttttccccaggaagtctggagaaaaagtcctcatgtcaccaatttctctgttgcatgaattttagtgttttgctataagacagcatgagggctatcaggccaaaattcattattgtatttccaatacagtttgtcttgaatgtctgtctcttaaaccagtttttacttgtcagttttctctcagcaaacagtcttactattatgtggaatttaacttttcagagaaaatttccaaagtcctctaccttatttggcttttatctgtgtcttttggaaaaggagctgcatggcctcagtgcctccataaaaagcttaagttgagttcatgggagaacattaagatcgttttttttcccttttagctcggtaatctcatgtaccacaggtaatgaccaagcatctctgctagaggatgtaactctcataactcctgtgtaaaatgaggatcctgttggtgatcctcattccagtttccaaagcgagaggagccttctgagcagaagtatgcaagactgattctgtttggaacagtttcctatttggctgcattctaggaggcctcctgacttattcatagtattgtcgcctggtggcattggtgtggggtagcttgtcctgctacttgctaaagttctctttctttgagaaaactgaggaaccagaatgcttagagttcataaaataatctctaaaccatgttaggttaaaacaaaatgaccatctcacaaaaacgagtttagttgaatgctcaattccttacaaaatcttcatttaaggctgagtgtggtggctcatgcctgtaattccagcactttgggaggccgaggcaggaagactgcttgagcccaggagttcaagaccagcctgggcaacgtaggaagactccgtctctacatagaaattttattataaaagtagctggggatggtggcacacacctgtagtcccagctactcaggaggttgaggtgggaagattgcttgagcccaggagtttgaggtttgcagtgagctgatcatgccactgcactctagcctaggctacagagcaggaccccatctccaaaaaaaaaaaaaaaaaag

SEQ ID NO: 643 - DNA, 2633 bp, Homo sapiens
gagagacgaccctggagccagtccccagagcagcagccagccagaccacggccgcctctcccgtaagccgctagcagcagggacggacgcgcagtcaggactggaactgcctcagaggcctgttcccatggctgaatggggtcttgcttctgtaggtccagggtttttatgacatctcccagttaaccacaatgaggaaatgtagtttggagctttttaaataaaaggctggcattgatgctgggattgctcactgggtgcatccagagagcagcagaggccagagctgtggtccttgggcctccacactctggctttgcagaaggatagcataaggggtcttagctcaaagcccaggcagccgtggggaggtctgatgtgaacaccagtgggtggagggctgtggggaggagcgggcccgtcaggagcaggccaggcccagtgggcatacagcgtcatctcaccctgcttccttcctcacgtcatctcaccctgcttccttcctcactggatacggtctttcccagccccagaagctcccgacaggcccaccatctccacggcctccgagacctcagtgtacgtgacctggattccccgtgggaatggtgggttcccaatccagtccttccgtgtggagtacaagaagctaaagaaagtgggagactggattctggccaccagcgccatccccccgtcacggctgtccgtggagatcacgggcctagagaaaggtaggggcctggccacaccgtggccttggcctgatcccccagctgcccctttccgcctggaggaggatgacgagcctgggatccccttctctcggcccaggcccccacccaccagcatgcctccatgttgctgtctgtggtgtttaccacagtcctaaagccttctgcctccctccagaagagcatccagagccatctcccctgcagctcagctctgacagtggcgggtgttcttgtgaggcctttgagaacttgctttggggaagggctgcccagaagacccctccaggtcctgggccttgaaaggccatgggagaatcagaaggtatttcccagctcctgagttcagtgagtgtccctctcaccaggcacctcctacaagtttcgagtccgggctctgaacatgctgggggagagcgagcccagcgccccctctcggccctacgtggtgtcgggctacagcggtcgcgtgtacgagaggcccgtggcaggtccttatatcaccttcacggatgcggtcaatgagaccaccatcatgctcaagtggatggtaagcgggcctggccgtggactgcagtggaagacggcctcccctaaatgcccttccctgtgagcctggggattagactcccccgaacagggcacctgaaagcttcatcagtggaatttgggaggctcttagtggctggagctgctctagtggtctcctgttgattctggtgccttgacctggtagacctcaccctccttcctgcccttcccctgacaccacaggggatcccaacacaactgttcagggccccttctcagccacaggggcccctcacatgtccagggagatcagaagcaattgaagtctttggagaaatggcaatttgtttcttctcttcaaaagcttagggacctctaggctaaataaaataatgagtaatctttacaacatttttcagagaacctcagggatatcattagaaatctttgccaggggtcccaagtgaaattcaaactctggactggggtagaaccttcatacaccagtggttttgctttgatgatgttttctctgcccattgtcaacttgtttcttctccattccctatagtacatcccagcaagtaacaacaacaccccaatccatggcttttatatctattatcgacccacagacagtgacaatgatagtgactacaagaaggatatggtggaaggtgagacacagttctgtgtttatagcttctgcgtgatatagtttcctccgctggcatgggggacaaggtattggtgaaatctggtgaagcataaacctgcgtctggtgtgacacgaagctctaagctccgtgtcattgactcattcataatacccttgaagctgtcaacttcatgaacccatgtgatgatgggacaacctgggtggacacctagaacatttcctccagcgttcctccacacgccgcccctgtgccagtcagtggcatcctcccccacacactgccccagctgagtctgactatgagattgggatcaagaaaaccatatacacattgccatgcaccattctctgactctgtttcccaggggacaagtactggcactccatcagccacctgcagccagagacctcctacgacattaagatgcagtgcttcaatgaaggaggggagagcgagttcagcaacgtgatgatctgtgagaccaaaggtgaagctctttgggttctctctcctgtcttggtgtttccagcgagggaaggcagagtcaccattccctgtgcctgtgcggtgctgggcctctttcccaggaagactctttgttttccaaataccctcagacttggtcatgtttcactctctactcatttgtctgtgcctaatactaaatagaccatgatgacaccttcaa

SEQ ID NO: 644 - DNA, 13795 bp, Homo sapiens
ccccgcacctccaagacagactcatatgaactggtgtggcggcctcggcatgagggcagtggccgggcgccaatcctctactatgtggtgaaacaccgcaaggtatggccctggtgtggggctgctgcctcccctgcacagcctttccagcaaggctgagcagagtcactgtctcttggccatctccccttgagctcctgaagcctgagccggtaatccccaccactaaacaggcccttctgtctcctccagtgtccatccctgccacctcccaggaagctggttgtaagatgggtgtgtgggaccctggaaggcccaggaaaaagccttgtgcgtgcatccagtactaagctctatgcactcaattcccagaagctcacactggcttctagtccctgaggagaccgtgaacagtctccctggtaaccatcaccctccttcttgctttcctctgtcgttagttgttgatgttacattttggttttttatgaaagtaagccgtgctgggtacatacctgcaggaaccctggcatggtaagccagctgtaatgccaggaaaacaaatatttgtgaacaagtgttttctctgtaggctgtgaaacacccgctcagttctcagaatctgtcatggcttgggttggacaagcaggcatttgagctcaaagcacatcatgttgttcagacctcagctgtttctccttgacagaaggaagtctgtccaggtgaatgcttcaggagctgtcagggagggagtctcgggctctgacaggatgcgggggcagagcccagccaggcctatgctcctggacactgtgtcctgtgaggcagggcagggtccccaggccgccactctcgctcaaggccgtgctcttacctgccgttaccccacagggatgaggacatgaaattccctgtaagaaaatgtccttgaaaatgtttttgttcactccaagtatatgccattttctttctaaggccatttgatagtagaaaactattattcttaaatggttttttaaaaattgtatgtgataaaagcatatacatgctgattttgcttataaaaatgctatgtgcacttgatggaaagcatatgaatgtggaattaaaagtctttctccactcctccccacctccacaaacaagcaagaaaacagaaccaaccctgcacagtggagagcgctagctgtgcggaagctgtttccctgccttggagccctggcccctgactccttctattctgtttttttccccttacatgctctcctagaagtccttgggtcaggacaagtccacagagaccctggggttgtcagaaagacacctaaggcagagcaccccctatgctccctctgctgcctccccagaggcagggggacggggcgagcagtttctcattagccctccacctgctggcctcttcataggcagccagcaaagcgggtgaatgagtttttaacaaaaagcagcattgttcacatgttgtagggcagggctggtcctaatcctatttccccatgtaactggacacctccatctcagagttgtagacaaagatcagggcaggccaaacgcccatggttcccaggagacaaaacccagcatgagagcaagactaatatttttcaggccaataggtggccgtgaagcagcctcgcagaagaggcagattggcaaaggccatgccgtggtgatccggaaatgccaggctcaggccgcattcaccccctcagtgtgtgtgacagtgactaattacccttctatttcttattttcatttctgggcccagtggaagtgtgaggccagtgctgggagggcagggtacatggggcgcaggggaagtgagagtccggacaggcccctgctgcgtctggcttctctcaggctccagcctggggtctcctcagcctggggttgccaaggcagaagttctggcttgaaagcagttcctctcttacggaactaacaagtcttaaagatcacccgagaaagaatttgaaatcgaaagtcagcattcgggctgtgttttttcatcccccttctcttgctggggattgggaatcattcagctaattttcactgtttcacatccatgaagcaagtttcatttcctggtgcatctgcagaccctgggctactgtgtttgggtttccagcaccactggggagtctcagtttgtaaaaacgtctccccttggaacaaatcctggaagcctgacaatgagcccagaccattcctgtgccttgaatggtaggttttgttcgactttggaatattctgctcagagagaagagcttttccttacagctgttttcttccttcagcaaaccacaacttgaggctccagcaggttctctggggtgtagagttggcagtaaagtctgttgtcccgaaaggtggcgcggcaaagatgagcagcctctcagcatcacctgttggggagcctggagctcccttactttttcctttaaagagctaggaatttgaagctattaaagattaatccatcacagtcacaattcatccacagtttttaagttctgagcaaggactgaaggcaggagcggaaacaaagaggattgaaatgatagaaactgcactgggctgaggatgtggagaggggtctagagaggccaggcatttgctgggcatctactgtgcaccaagctcactgtggggcactttatacaacttctctcatttaatcttcagaataacctgagagagtttatttgcctcattggtgaaatgcagagctgaagggtcagagagttaggggacttgctctgagttacacaaccgggatttgaacccaggactttggatcccagactcttcttcccaggatagggtgcaatgatgggcatgctctttggagtcaagtcaccgttttggtgctcactagccgtgtggccttgagcaaattgctcatttctctaaaccttagtctccctatttgtgaagtggaaacaatattaacaccaatcttttgggctattttgaggaaaaggaagtagcacctataaactgcttagttccatgcatagcacagagcaagtgcttagcgaatgttgctattttaatgggtgctgatactttcgttacctttctcatcattgtgtctcattagaatataagcagagggaactgcatttggtttacatacagaaggagaaagaaaacaaaacatggagattctttgaaatacagggagagaaggtctttggaggagttctcagcaatatcagtcaggctgtctgacttcccccactgaggtttctttgatgagatcattagacgagggatcagggagcctgacttgaatgtcccagtgaggttggtgtcccatagccaggggggccagtccgaggctgtgccaccctaaccccaacctggcttatcgtccttccccttctcctgccctcttgggctcagcgctgctttctttgtaaaccatagcccactcgtagcccgaggctgagatgccggtctttataccagctaccttctccagcaggtcacaaattcctctgacgattggaccatctctggcattccagccaaccagcaccgcctgaccctcaccagacttgaccccgggagcttgtatgaagtggagatggcagcttacaactgtgcgggagagggccagacagccatggtcaccttccgaactggtgagagtcaaacattgccccttgcttagggtttccgtgggtctaagcaagttccactggcccaggtgagaattcctgctcaccttgccccagctgttcaccttgaacttcatctttccttccagctactgcctccttgtggtttgtgtgctaggctgaggtcccagctctcatcaggagagtagccagccggcctctctggcaccccttcatccctctctcacacaggggccagcaatagtaccacaacagaaccagtctcggccgaggctgagcccacaccctcagtgccccggatgcttatttgcatcactttgtcatgccgcttagcagagtctcaggcaaaaaggactctgtgggagggagatctcatgcctgcttcctcccttgctgactacaacccatttccacccaggacggcggcccaaacccgagatcatggccagcaaagagcagcagatccagagagacgaccctggagccagtccccagagcagcagccagccagaccacggccgcctctcccgtaagccgctagcagcagggacggacgcgcagtcaggactggaactgcctcagaggcctgttcccatggctgaatggggtcttgcttctgtaggtccagggtttttatgacatctcccagttaaccacaatgaggaaatgtagtttggagctttttaaataaaaggctggcattgatgctgggattgctcactgggtgcatccagagagcagcagagggccagagctgtggtccttgggcctccacactctggctttgcagaaggatagcataaggggtcttagctcaaagcccaggcagccgtggggaggtctgatgtgaacaccagtgggtggagggctgtggggaggagcgggcccgtcaggagcaggccaggcccagtgggcatacagcgtcatctcaccctgcttccttcctcacgtcatctcaccctgcttccttcctcactggatacggtctttcccagccccagaagctcccgacaggcccaccatctccacggcctccgagacctcagtgtacgtgacctggattccccgtgggaatggtgggttcccaatccagtccttccgtgtggagtacaagaagctaaagaaagtgggagactggattctggccaccagcgccatccccccatcgcggctgtccgtggagatcacgggcctagagaaaggtaggggcctggccacaccgtggccttggcctgatcccccagctgcccctttccgcctggaggaggatgacgagcctgggatccccttctctcggcccaggcccccacccaccagcatgcctccatgttgctgtctgtggtgtttaccacagtcctaaagccttctgcctccctccagaagagcatccagagccatctcccctgcagctcagctctgacagtggcgggtgttcttgtgaggcctttgagaacttgctttggggaagggctgcccagaagacccctccaggtcctgggccttgaaaggccatgggagaatcagaaggtatttcccagctcctgagttcagtgagtgtccctctcaccaggcacctcctacaagtttcgagtccgggctctgaacatgctgggggagagcgagcccagcgccccctctcggccctacgtggtgtcgggctacagcggtcgcgtgtacgagaggcccgtggcaggtccttatatcaccttcacggatgcggtcaatgagaccaccatcatgctcaagtggatggtaagcgggcctggccgtggactgcagtggaagacggcctcccctaaatgcccttccctgtgagcctggggattagactcccccgaacagggcacctgaaagcttcatcagtggaatttgggaggctcttagtggctggagctgctctagtggtctcctgttgattctggtgccttgacctggtagacctcaccctccttcctgcccttcccctgacaccacaggggatcccaacacaactgttcagggccccttctcagccacaggggcccctcacatgtccagggagatcagaagcaattgaagtctttggagaaatggcaatttgtttcttctcttcaaaagcttagggacctctaggctaaataaaataatgagtaatctttacaacatttttcagagaacctcagggatatcattagaaatctttgccaggggtcccaagtgaaattcaaactctggactggggtagaaccttcatacaccagtggttttgctttgatgatgttttctctgcccattgtcaacttgtttcttctccattccctatagtacatcccagcaagtaacaacaacaccccaatccatggcttttatatctattatcgacccacagacagtgacaatgatagtgactacaagaaggatatggtggaaggtgagacacagttctgtgtttatagcttctgcgtgatatagtttcctccgctggcatgggggacaaggtattggtgaaatctggtgaagcataaacctgcatctggtgtgacacgaagctctaagctccgtgtcattgactcattcataatacccttgaagctgtcaacttcatgaacccatgtgatgatgggacaacctgggtggacacctagaacatttcctccagcgttcctccacacgccgcccctgtgccagtcagtggcatcctcccccacacactgccccagctgagtctgactatgagattgggatcaagaaaaccatatacacattgccatgcaccattctctgactctgtttcccaggggacaagtactggcactccatcagccacctgcagccagagacctcctacgacattaagatgcagtgcttcaatgaaggaggggagagcgagttcagcaacgtgatgatctgtgagaccaaaggtgaagctctttgggttctctctcctgtcttggtgtttccagcgagggaaggcagagtcaccattccctgtgcctgtgcggtgctgggcctctttcccaggaagactctttgttttccaaataccctcagacttggtcatgtttcactctctactcatttgtctgtgcctaatactaaatagaccatgatgacaccttcaaggaacttgataattaactcatccatgaaatcaggggatagacctcattcttaagttgggaacttcctataaatactttattcctgcaatgatatttggtgcttacatgggttggtttatttaactgaactacaatcccatgagatgggaaaggaagtgggcatgaggaagctgtatactgcagccaaggccatgcagccggttaggggtagagcatgctttgggccaggattgtcttaactacaagaccagcccctttctgttgcacttaaaacatgttaaacatagtcacataataacttgttaatatttgcacattggtcagatggggagatagcattatctccgttttgcagatactgaaagtgagataaagcagttgtattgcaaagaacataatcaggagaagatcacaaaggaataggaatagagacagaacaacacatttttctctcatcaaggcaatggcattctctctcctgcttcactggctttcagttgttcagcagatcctccctgagtgcctctgtgtctctccctgccctcttccatcatgcacaccagagggagggcagatacatgcacagcccagaatcctggatcacctggtgcagggagtgcccagagggaggaagagacttcataaagccttcacactggtcttctggaaggaccgagtcttaggctaggatgaggagggagtggcctggaggacaaggctggacatagctccagatggttggggtgtcaggcaccgggaaggaggttatgggagtgaatgcctaggaaagaggccactgaggatggtgtgagatgagccggtgcagccagggagagctggagccactggaggctgtgaggtggaggagggctgtcagtggatttgtctgctgagatgggtcactggtgactgtgcagggaatgggctgagggttgagaactggggctctaaagtaaaggtaaagagaagggatgggtttgagtctcttttctaaggaggtgtgggcgggaccagggtcagcttgcatgctagggctgggagagagtgaaagaagttaaaaataaacttcaaggtttccagctggaagtactgcacaggtgatgttgccacttattgaaatggcaacggcaagaagacagatttcatgagaaaggaacaaggtaaaaccacttggaggcttactgagtctttgactctttggagacattgaaatgaagtgtcttgataaggagcagagctcctgccccgtgcagggggtccgggtggggagattggtttgcggctctttaggatataggtagaagtcacgggactaggtgagaatatacagagagtacagacgggaggaaccaggaaggcctcccagtgtctgtggaggcagacggcacagagaggaaaggagaggcatacagagcagcagagaggtgggggacattaggggacagagtccgaaagccgggggagaagatggccacgagggccagcagggtcagatgcacctcctaacagcaaagctaaagtgaggagctgatggccttgactccacctctgaattggcatctcacatgtactgtgtgtcctcgtgagtccgggaacacctgtccccctgctgtgatccatgctaatacctagtgcttcacgtctcagtccaccagcaggtagcacgctcttgggtgtcggtaaattcttccattcccaattctttttctggctcctgcattttaaatattttcttccaaaagttcaccagttcttcccaaaagcactacaccgcttctgccggaaggacccagtccaactctagtgcatggctcacagacatctcgctctgctttgaaatataaggctcaggtctccgccacaacaccagatttcacattagattccaatttcatgctgagtgtggacaccattcaaataagagattttgaggcccaatctagtgagtctgaccccatttcccaaacccatggaatgggggtatttttttttctatttgttgtgaaggaaatatcaaagaaacatatgctgaagtgagttttgtccacaattacagctcggaagtcttctggccagcctggtcgactgccacccccaactctggccccaccacagccgccccttcctgaaaccatagagcggccggtgggcactggggccatggtggctcgctccagcgacctgccctatctgattgtcggggtcgtcctgggctccatcgttctcatcatcgtcaccttcatccccttctgcttgtggagggcctggtctaagcaaagtgagtgagtgacgctttcagtgggaggatcctgggtgggaaatgggggctccactaaggaggcctctgcctaggtctgtgtccatggaaagctcaagcccaagtcccccaaaggtctcggaggtcagagaacacccaacgactgggcccctcccccagctcacagacctcggcttggggaggaggaaggagggaaagttgggctgtcttctctgcacctttggagctcgggacctatgttgtgccatcttctgaagtgtccgaagctgctcctctgacctcacattcctacttacagtccatcctgcctcttccctgggtgcggagctgccttcagctttcccctctatcctggaatctgacttttagtcactaatttctgcttcagatggcaaaacatctggtcagcttacctcctctaaatattgttcttcttttcactcaccgcctcctgcccccaagccctggaccctgtatctccccacccttctccctgcagaagagtctaggtgtcaggtagaaatgggcgacacaaaggagactctaggagaaaatgttctccatcgcttgggcactgtcaactccctgcctacgtccttcaaccctctgtggccaggagcctcctgagatccttgtggggcttttccaacccatcccgggctaccttggcctaagcacacctttatttttctgtccttccagaacatacaacagacctgggttttcctcgaagtgcccttccaccctcctgcccgtatactatggtgccattgggaggactcccaggccaccaggccagtggacagccctacctcagtggcatcagtggacgggcctgtgctaatgggatccacatgaataggggctgcccctcggctgcagtgggctacccgggcatgaagccccagcagcactgcccaggcgagcttcagcaggtagcgcattcttgggtgtgggcggcaggtatgggacacccaggagggagtggctgggctgccttggggggcctcctccctcctagggtctcaggctgggctgctgggccaggctttctttagtcaggagcagatgctcctgttgttgagtgaagactggaaagttacctggactccccggcgtggccgtctcattactcttccttttgagcagcagagtgacaccagcagcctgctgaggcagacccatcttggcaatggatatgacccccaaagtcaccagatcacgaggtaaccaggcctctcccctttcactcccaagccccacagcctcactttccctttagctcctcaaatccaaggcctgtcactgagagccaagcagtagtgctgtactcaggggtccccgtgactgacaatcatgctcctctgaaccattgccctaataggcagttgttgcatttgcaattgcgatgccctttctgcctgagggcatggcttggcatctcggaatcctccgtcactagacagatcagaagcacccaccacaactgactttgcccatgggcccctggacacctgacttcacattctcccacatggagtaaaatggaaatggactagaatgatcagtgggaatgatggtgtggtacctcttgatgttcaaaggggagagcagtccttgccccatctgagctctcaccagctctgatgccctcagacagggagacagccagcagggggatggggcgacaggcccaccctgcccagccccacctccccatctgggcttgtgcactgcaggggtcccaagtctagcccggacgagggctctttcttatacacactgcccgacgactccactcaccagctgctgcagccccatcacgactgctgccaacgccaggagcagcctgctgctgtgggccagtcaggggtgaggagagcccccgacagtcctgtcctggaagcagtgtgggaccctccatttcactcaggttggttccaggagcagggcagggaaattaaacaggctgggggtgacatgaggtaggcatccacaagccagtagtaacagtcttcaaaggtggggcttggtaaggagccagccacagcatttatgtgggagggatggggcatcgagggtggctggccactttccttcactgctgaaggcccagtaggtctgtgggatgtccaagtgggttctactgcaacatgataagctgcggtcctcagcctctgagaaaaaggctatttctccatttcagagaaaaaagccctttttggtctgtgcatttcaaggccattcacaaattccatttgctgctcatcacactaagaggcattctctaatcactctgaaatgccttgctttgttgaggcttgtctcttaattaaggaataaggttgcctcaatcattaaggagccaaattcttacaaacatcatcatcataactctttgtacttccacggaactttttctccaaggagttttgggccattcacgctaagcccatcccattgtcttcctccatgctagtctccttagaaatcagtggatacttggtgagggcaccaagtatccactaacgtttcttagcttctctgtgtgtgtgcccattcataggcagatcctggactctgtctctaggagattaaatttaaaagatgctgggtcctaaagctcgacccagcatcatttaaactggaccgtgtcaatctggggggactggattgtgagtgggatgattgtaaccagaagccatagcaaagggtggactagccgcctaaacatagaaagagcagggcttccttctgcgtttcacgggctgcactgacttcatctgctcctgtggtgtgggctcagtgcgggagtctctacagtcccagcatgagtgggaaatgggtggcaagtggccctccctgttttgatgagagaccttggagggaacagaagtgcccttgtctcggttgtaggtttctgtcccctttccagagccagtgtaaccacctccaccacagatagagattggcccagtgtcactgggtgttggctcctcggtcaatctggattttaatggttcctactctttctcccctcagggcccccatgctgcttgggccttgtgccagttgaagaggtggacagtcctgactcctgccaagtgagtggaggagactggtgtccccagcaccccgtaggggcctacgtaggacaggaacctggaatgcagctctccccggggccactggtgcgtgtgtcttttgaaacaccacctctcacaatttaggcagaagctgatatcccagaaagactatatattgttttttttttaaaaaaaaaaagaagaaaaaagagacagagaaaattggtatttatttttctattatagccatatttatatatttatgcacttgtaaataaatgtatatgttttataattctggagagacataaggagtcctacccgttgaggttggagagggaaaataaagaagctgccacctaacaggagtcacccaggaaagcaccgcacaggctggcgcgggacagactcctaacctggggcctctgcagtggcaggcgaggctgcaggaggcccacagataagctggcaagaggaaggatcccaggcacatggttcatcacgagcatgagggaacagcaaggggcacggtatcacagcctggagacacccacacagatggctggatccggtgctacgggaaacattttcctaagatgcccatgagaacagaccaagatgtgtacagcactatgagcattaaaaaaccttccagaatcaataatccgtggcaacatatctctgtaaaaacaaacactgtaacttctaaataaatgtttagtcttccctgtaaccttcaaactgagtcatgtgtgagtcagcattttctttacatgttagaattcagtctctgagtatttgaagaaaatacccacttacaatattttcaggtccatcagaaatgagatctgaaaaaggtagtaaatgtttctcttttttgttttttaaaacagtgaatgtcagttgtgcttggattcatgcagaacacattaccgtttagtccacaagggaaccgttgtacaacagaccaggaaaaacaggttcatagttctcttaccaactggacttgagatgaagtttaggtcatattgaagaaatagaactaatcttttttatataggtgtgtgttgaagaccaaatattttctccaaaatactgtttagctaagtgctgtgccacacatggacatatggtgcataataaattcacttcccttctttccaaagatacaccaacattgccagagtagttgactcactagtttaaaatcaacatttacttactgttgtccaaccaaaggatcaaccatagattcttttttaattgaaattttaaaatctttatatgtggaagtggaattagatggagactgatgcttgcaatgaaagccttactacgctttgtgttttggggctggagagggtggggggagcctgtattttctagatttctgtaaaattgagttacagatgaaatgccacttgagacaatctcgttaagtggggggccagaccctggcttttaaacatgaagaatttgataaacagggtcctagggaagagtcactctgactgtttagggcaagtgcatcctctgctggccaaaataagtatagcacctgctattcctgacttctgcatcctttttccatcaagctcaacgtcagagagaacttcatgtggaagtgcagcatggttttcaggaaagcagtatttt

SEQ ID NO: 645 - DNA, 362 bp, Homo sapiens
aaacttttataacaaaattaacatcaaaaggtatatactttttaaaaaaaatttacttttattgatgtgtactcttcctattgatgagttaattccataaatctctacttagtttaacttattggatcaaattatcttcagcatgtatatctggggaaaaaaggtccgaattttcacatttatatttaaacttcaattttttatatttaaacttcaattttttagcaacagctgaatagctttgcggaggagtttaatagttacacattcatgctaatatacatttcctttaaacatccacaaattcttaaaaagattgaatcagtaaatttcatttcagctaaaaatggagtctaatatat

SEQ ID NO: 646 - DNA, 1083 bp, Homo sapiens
ttttgtttactatgcataaaagtctacaatctaattaatagcaatactagatgtttattattagaaaagatgctgagagtatttatcaggttttacaaagtcattttaagaaagcaagatactgatgttaacagaataacatttttggggaagctggctccctattcatggtattttaagagatcatttgtatattatttatcacactgttgtaatgatgttttgagatacttttataacaaaattaacatcaaaaaggtatatactttttaaaaaaaatttacttttattgatgtgtactcttcctattgatgagttaattccataaatctctacttagtttaacttattggatcaaattatcttcagcatgtatatctggggaaaaaaggtccgaattttcacatttatatttaaacttcaattttttatatttaaacttcaattttttagcaacagctgaatagctttgcggaggagtttaatagttacacattcatgctaatatacatttcctttaaacatccacaaattcttaaaaagattgaatcagtaaatttcatttcagctaaaaatggagtctaatatattgtttcaaaagatacatttttacccaccataaatgttacaatatctgaatatgctttgtcaaactatccctttatgcaatcgtcttcatattgtttttatgattctaatcaagctgtatgtagagactgaatgtgaagtcaagtctgagcacaaaaagataatgcacgatgagattgcctaccattttataggatatttactatgtatttatacgttaagacctctatgaatgaatgtatcagagaatgtctttgtaactaactgtttaattcaatctgtaataaaaatctaactaactaactcatttatttctattaaaaaggtattgtcctttaggcggggaatgggaatccttgctgcactgttgcagtcattctgaaaggacctttccctgtacttacctttcaacatgcttcaatcttatcaacgctacattttgtatttttcaaacaagtataaattctgcaataaagagatgtagtttttttttaa

SEQ ID NO: 647 - DNA, 593 bp, Homo sapiens
ggattcaatcatctttattaacctatcatcagtgttacattttatacataatatcttgtattctcaaagggctctactttagtacatcatgttaatagtaaaaagccaagtaagatggctaaacctcaccctagcattttaatatcctccggacaagggaagctagaaagtcaagtcaatcactttatacatgtaagagtagtgttccaaagtaactaagaagctgctacatttttaagcagggaggaaaaaactttcattttggtctttgtgttccagcaaattatactttcaattaacaccaacaatgatatcataaaaaatgctctgcttttaaatttctgaacttcttcaatacaaattaaaatagtactggagtcttttgggaggccaatagctagcagctacattaattggtgtagaggagcctccttatcgataaccaggtccaggttgggtatagccctgaccaaagggaggacggttacgcgcataaggattaggcccacttggaggaggggtcatggtacttccaggaagtgaagtaaaacctggtcttggttgataggccccaggttggcttggagccattc

SEQ ID NO: 648 - DNA, 1998 bp, Homo sapiens
cgccgttctcgcctgcctgctgcccgaccgcgcgctgcgaacgcgcctggtccgcggggagctggcgcgcgccgtggtgctggacgagggcagtgcctcggtggcggagtctcggcccgacagcccggctcatgtgctgctggccgcgctgctgcacgagacccgcgcggggcccactgccgtgtacttcctgcgaggtgagcaagccggccgcccttggcccgccccacccgactccagcccggctttccctgctgatcgtgctcttcccctccttgcaggaggcttcgacggcttccagggctgctgtcccgatctgtgctctgaggcccccgcccctgcgctgccgccaacaggggacaaaaccagccgctccgactccagggctcctgtctacgaccaggtgagtattgacccccctcccccgaacctccctctctccccgccgcggactgggcgcctctagggaaagagcctgccatttggggatgcgagcagtttgcccatatacacacacttttatacgtgtgtgtgttgggggagggggtggggcatggctgctcgcgcgtgcctgtatgggtctgtgtatgtttgcatgtgtatgttgggagcatgaagggaaatgtatgtcccggtgtgtcctccgcacattcctgagacctgtctcaggtcaggaggactggctgaggagtcctcttgtctcggccagcccatggggtctccactcgctgctgctccagctctccggggctgggctggaaaggcctcaccgcccctctgttccctccagggtggccctgtggagatcttgccctacctgttcctgggcagctgcagtcactcgtcagacctgcaggggctgcaggcctgtggcatcacagccgtcctcaacgtgtccgccagctgccccaaccactttgagggccttttccgctacaagagtatccctgtggaggacaaccagatggtggagatcagtgcctggttccaggagcgcataggcttcattggtaagggggcacctctgcccagaaatcccgaggggctccagaggagaggactgggggcacctgtctcctgggctgtgcacattccgtctgacaccactcccccatctcccttgcagactgggtgaagaacagcggaggccgggtgctggtgcactgccaggcgggtatctcgcgctctgccaccatctgtctggcatacctcatgcagagtcgccgtgtgcggctggacgaggcctttgacttcgttaagcagcgccggggggtcatctcccccaacttcagtttcatggggcagctgctgcagtttgagacccaggtgctgtgtcactgaggtggtgcccctctgcctgcctgccccactgtgctggcaggagctgactgtggactggtgggctcccctctgggccagcacagtcccctcacctctggcagggctgctacctcctcagagtttcagaagcccccacatgggggctctaggaatgccggcatgctggtctttccgacctggtgctcttctgctgggggactgaggctggccctcattcggggtcgggaaccaagggtgtgtctgctctttccctccccatcctctggcagaaatcagctagacgctataccgtggactctccctggtccaccaccatgttgaagcccttggcagcctgagagctccaaggaacaagctgtgacaaccaggagccctgtctgtgggttcgtctgcccagggcctggagcccaagccctgtgttcctggggaagctggggacttgggaagtgatgggtgtgtcatgttgcgtgtgtctgtctgtgagcctttcacacctgtgctggcgctggaaaattatttgtgctcagctgacatttaacactccctcccccgcttcctcctagccctgtgggcaggggttggaaacttagcactttatatttatacagaacattcaggatatgtcaataaaatattgttatatttaaaaaacaacaa

SEQ ID NO: 649 - DNA, 1574 bp, Homo sapiens
atcacaaagaaaatctttaagtcccaccttaagtcaagtcggaattccacttcggtcaaaaagaaatctagccgcaacatattcagcatcgtgtttgtgttttttgtctgttttgtaccttaccatattgccagaatcccctacacaaagagtcagaccgaagctcattacagctgccagtcaaaagaaatcttgcggtatatgaaagaattcactctgctactatctgctgcaaatgtatgcttggaccctattatttatttctttctatgccagccgtttagggaaatcttatgtaagaaattgcacattccattaaaagctcagaatgacctagacatttccagaatcaaaagaggaaatacaacacttgaaagcacagatactttgtgagttcctaccctcttccaaagaaagaccacgtgtgcatgttgtcatcttcaattacataacagaaatcaataagatatgtgccctcatcataaatatcatctctagcactgccatccaatttagttcaataaaattcaaatataagtttccatgcttttttgtaacatcaaagaaaacatacccatcagtaatttctctaatactgacctttctattctctattaataaaaaattaatacatacaattattcaattctattatattaaaataagttaaagtttataaccactagtctggtcagttaatgtagaaatttaaatagtaaataaaacacaacataatcaaagacaactcactcaggcatcttctttctctaaataccagaatctagtatgtaattgttttcaacactgtccttaaagactaacttgaaagcaggcacagtttgatgaagggctagagagctgtttgcaataaaaagtcaggtttttttcctgatttgaagaagcaggaaaagctgacacccagacaatcacttaagaaaccccttattgatgtatttcatggcactgcaaaggaagaggaatattaattgtatacttagcaagaaaattttttttttctgatagcactttgaggatattagatacatgctaaatatgttttctacaaagacttacgtcatttaatgagcctggggttctggtgttagaatatttttaagtaggctttactgagagaaactaaatattggcatacgttatcagcaacttcccctgttcaatagtatgggaaaaataagatgactgggaaaaagacacacccacaccgtagaacatatattaatctactggcgaatgggaaaggagaccattttcttagaaagcaaataaacttgatttttttaaatctaaaatttacattaatgagtgcaaaataacacataaaatgaaaattcacacatcacatttttctggaaaacagacggattttacttctggagacatggcatacggttactgacttatgagctaccaaaactaaattctttctctgctattaactggctagaagacattcatctatttttcaaatgttctttcaaaacatttttataagtaatgtttgtatctatttcatgctttactgtctatatactaataaagaaatgttttaatac

SEQ ID NO: 650 - DNA, 17967 bp, Homo sapiens
gactcccctgcaaagcgcccagccctgggggtaggtgccccctccccaccctttgggctcatctgggctatgcccatgggcctgtagggacgggaaaccggcctctctacgggacaggccttggagatgccccaaggtagcggctgcctcagaagagccttctccgcacaataaaacttaacacaaatgccgggagcccatgctggtccgtggctggagagcagagggtggctgggagtaaaccggggcaggaaggacccctggggtcagctggagagggtcagcatggaagcgtgagggttcccaagccctgaggccagtttcccaaggctggaggctgagccccggccttccacacagatccggaaacggcactcaagcggcagcgcgtcggaggacaagctggctgcctgcgcccgcgagtgtgtggagtccctgcaccagaactcacggacgcggctgctctatggcaagaaccacgtgctggtgcagccggtaggaaagcttcatcctgccatccctccccgaaggtccccgaacgagacgactggaagcctctagccatggctattcctttcctgaggagcttgaccagagacgggggggagaatggccccagcctcccaactccctgtttcacacgactcacgcccagcctttagttggcaggggacaggaatggcagccagcaggcgaggggagtccgcagtgtgggtatggctggcctggaatggacctggcatccaggaggctggcaggagagagtcagtggcaccaggctgaccagggaaactgagtcctgttttcctgtgcttctgccccgtccctagtccaggaccccgtgactagcctagcttggcctcccctcctcccagcgggagctcatttctcataggccatccctgagagcctctcagcccttcatcgtcggtcttccggtgtctcccgctgtagaaggaggatatggaggcggtccctggctacctctccctgcaccagtctgcagagagcctgactctgaagtggacccccaaccagctcatgaatgggactctgggggactccgagctggaaaagaggtgggggctttgggactcaatcccaggagccagggcagggagtgggtttgacctcaggcagagggatggagaaaccccgcttgctccaggaggccaacctcactctttatttggacgccaagaatagcagggagcggctgcctggagtgattcccaagctctctaggacggagccaagcctggccgtgaagaggtttgtctgagccaagctctcagcggctgagacggacagctgtccatgtgccgagcgggcagcacagatctcaggggtcatggctggctgtgtgcacctcttggctatggtcatcctatcttcaggggagtttcgtggggtggtaggaccaggagacaaggaaggaaggaaggatggcaggtctttggacacagtgacagcagtctggttcctttctagcgtttactgggactatgccctcgtggtgcccttcagccaggtcgtgtgcatccactgccaccagcaaagtaagcctgccttgtcctcggctcgggtgggaagggagaggctgccttctgccagctgtgcactgtgcgtggggcctgtaagactcctcgtcctcctcccatccttgttaatggggctcccaggccatgctgtagcccagccatctgcctcctacccagcctgggggcactggccagcaggctgtgatagccgacgagagggcctcagccgcactctccacgttcacccccagagagcggtggcacgcttgtgctggtgagccaggatggcatccagaggccgccgctgcatttcccacagggaggacacctgctgtcctttctgtcctgtctggagaatgggctgctgcctcagggacagctagagcccccgctgtggacccagcaagggaaggtaactcgggtgggaggctttaggggaagggctgtgtgtggggttctctgcccgcctcccttccttccccacgtggagttcttaggagcggccttgtgtggaaccctggatgagactctgccctatacagcccgaccacctacccctccttccacaggggaaagtgttccccaagctacggaaacgaagcagcattcgctccgtggatatggaggagatgggcacggggcgggccaccgactatgtgttccggatcatctaccccggccacaggcacgagcacagtgagtgtcccgagcttcatcccgggggaggagaggaagacgctccgggaggcggggagcgcagcgtcacccaggagggcagcaggcagggcccactgaccaggccaggttaacaccagaggctcatcgcctagcctctcagctggaccttttacccacagatattgcctttgaaaaggtgcgtctcttctacccagctcccttccccacttctccacgccaggactcttggctcagcagacctaggcgtcactacacaagactcttagttatcctttcagaccctgtccaggggtaaaacacgtggagaaacgagaagtagaaggtggggaaccctccattgctcttcacctcctgctccccaacccctacaagacagcctgggtatgggaccagcgctactttttttttttttttttttttgagacgacgtctcgctcttttacccaggctggagtttaatggcgtgatctcagctcactgcaacctctgcccctgggttcaagcgatcctcctacctcagcctcctgagtagctgggattacaggcgcacacctccatgcccggctaatttttgtatttttagtagagatggggtttcaccatattggccaggctggtctcaaactcctgaccttgtgatctgcctgcctcagcctcccaaagtgctagggttacaggcgtgaccactgcgcccggcccagcgcttctttttggatggtgaatattgtctgctgactcccctagagccagagccctcctcaaaccaactactgatgagcgttagctgaagtagcaggttgcatcagaggcagactcggggctgcctgggggctttgggcactggcgggtagaaaggcggcttggcccttgtgggtcctgccccaccctggacacacacccctgggcccaagggggtctctctgtctatgtgcatctaccaacaccaaagttccctttctggtcagagtgctgctgctgcccataggcttctctgggcagacttgcttttcttacagataaggtcggggaatttgccagcccagagcgtttattgctaacaagaccacccgctccctaaatttccaacttgtgccaaaaagttgtcaacaagttgtctctgtattagggactggactgcccagacggcacactcagccacagcacagatagctccaccaggctcagagggcacacggcacagggatgtccccccttcccagatgtacctgacaaagagacgcatctttggccagaatgtatttacacacttggcacttagtctcaggctgttgcttggtttagcttctccagtctctgcctcccctcttcgatctttgccatttcccagtcctggtcacttcacttccaggaccacctcgccaagggcaagccagggcacccagaggctgaaactccaccaagcgactccagctccttgaggacagctctgggaaaaccctttccttttcctgggagggaagaaggtggaatttatagtctgaaaaaggggatttggagtaatcttcagatttggtccagcctgagaggagctagagaacgatcaggacccatctgccagctgtcatgcgcagcctctgtgagggccgatgacctcctgggctgccagcccatcccagacagtcccagtctttcacatcctcccacctctgttctctctcttctgttcttcctagagaggctgcctccgaagagtgaggttctgcagctgccccagcccctcgcctccttccacactctcccaggaaaatcatccaaagagctttctggtcccctcccttcccctcttctgtgccctgcagattcacgatgaccccggcctccattccactccccttaaggagggagtccgtcctgcccagggatgagggcctcatgcctctgcctctcgctgttctctttgagcagtcactattaactaccaccacctagcggccagccgcgcggcctcggtggacgatgatgaggaagaggaggataaactgcacgcgatgctctcaatgatctgctcgcggaacctcacagctcccaatccgatgaaaggttcttatccctccctctccctgacccacctcatccccaccctccctcccgggcccgcctgccacccaccacaggggctcgaacggcagtgttggcattaggggacttgcacccagggcagttcccttccatcgggggcagatcagggagggcagaaggaggccagacaggtgctggcaagaaaaggggctggcccagggcaggtggctccaggctgtgaggaggaagaggatttgctaataggaaggtctgattatctgattgcctcctgggcaccctgaatggatctctgagcccattcctactccgggggtcaggctggcaaatgccagacagaggtctcttcctttctctctgctgattgggaagaccagcctctgggcctggtgcttctgactcctgacttaacagaaacaggatggaggtaccgggtccttcctggggcaggggcagcagctgtgggtcaggcgaggggttgagggctgccatgcgaagggccccagggctcagtcttcccaggaggcctgagggccccagccggcagggcctggtactttggcatgaaatctagaaatagctgcagcatggtgtccaggaaggggccaggctcagggcctggcaacatgaactcccgccccagatatgcccctggttcactgtgtggttttgagcaagtttctcactatcccggagctccgtctcttcacctgcgccagggatataagacagatgtgttcctgccctcatgagtctcagggtccacgaatggagaggtcacctttgttggaggtgatagcgtagtgccctcagcctctcagggttcctctgcctaccacccatctttcctagcacagagctggcttggtagagagggagcccccctcttttcagcaagcaatcagccaggcgacctgtgagggctgggatgggtgctccagaaaggggtgggtaggaagaggctgaggccagttctcccagagacgaggggagcttccccattcccacccattcccatgctacaaaatcaattgcttctccctttccccgcccctgcagaggatgtcctcagaatatgtcacactccccttaggcttccaaagttctgccgggaagcccagttccttagccggccactgatccagtaactgtctccgggcaggcaggacggcctggtctgtgttagaacacacccagcacaccctctgcacaagctgccagctgccctcctactgccaggcgcctgccctcatgcccaccctccctcccagcccttccaatatgagcccgtaggccaggcctaggtgggaacatcctacttctgatgtttattgcctacacacacccctgccatctggttccttgcaaacctggacttggggctgttgcctatttacagtgaactgactgagcagtgtgggaaggttgagctctgaggggacccacggagctacttcttcccccacgaactggtagtcaggctagaggctggagggtcctagcagagcccttggcagactcggtgataaaaagcctatccctgactagtcttagggctgaggcctccgggatcagagaaacttccagacccacttccaggggtccagaggcctcagggctcatctgtgcatcctctcaaggaactcaggggctaggccaacctagtatagagcttctgggcccctaatacttgggaaaggagaggaggcataagagcagaatcagcaggcggttggggagagggctggggaatgggggccccccacctccactccagtccataatgacaacactgttgagtccgttctgccagctgttgcttttcaggcctgcaacatgcttgacttgtgcatgtgaatcagtggcggggtgtccaaatttcctctccctccctcttcctctccccttccttttcctgctgcctccccacagagcagatgctattcactctaattctgctccaggccaggcacctttcactcggagtcttaggggctgtggggttcgcccaccctgttttcttgctttacactttcctcatgctcagaggagagagtcagagtcaaagctgacccagcagacccccctccccccgtccagcctgtgccctcacccagtcacgccatagccccagctatctgcactgggctcgctcagagacagtgttcgaatgtggctggttcagctccttcctggaggattaaggtgaagagcattggcccaggagaccttggctgggcctcctttctgggcatgagcttggttccctttgcccacccccgccctcacccctgttgccctccctgcctgcccgcctgttgcctgctgcctgcctggctgggcctcttcccaccccggctcctcccgagactgtcctcttctctcctgcctgctgcaggggcctgagctgggctcctgccccactgcacctgcaccctccccttcttcccagagtctcaggcatggcttgcaacaccctcactcccagagccgcagcccctcctcaccacgcgtgttcccttaatttgcctcctggtggagctgaagggccagatatctgcaaaactcccggccgtgggtctgggaagagagccccggccaaggcagggcaaccgctgagggaaccggaaggggctcagctcagccctcctcaccaaggcacacccagagctggagtccagctcccaccaaagccaggcccacgcctgcggcaggccacagtgggccccggcccaggctgagccagccgagcaaactgctgctgacaggactccctcagcacacacggctctccatccctgttcttccgaactcttctccactctctccctccctcccggcatcaccccccagtgcttccacttcctctctcactttgcttcatgtctgtggctccctggacctgccagagtcccccttaagcagtgccctgccccacgtgggccgtggaagctctcgagggtcttgagttctgattcagaccgcctgggctggctgggcaggccctgtcgctggcagcgtagctgtgtctaaggagtcatcttctgaggctgcaactgggcctgttcttctctgtcacattggatagtgggcctctgtgcccagccaccactcccggccccgcagtggcctcgtagtcctgggacctgtgacttccatccagctccctggtgttttcgggaggccaccatgctaactgctgtcaggctaggcagggatggagcagagctcagaaaggggccataggagctgacagcaggggtacctggcctgggcacggggcactgctcatccgtagccactggccaccagatctagactcccccagaagagccaggcctacgggcaggtgactcagattcctcgggggctttgaacagtggggactccctggaggggagcgttcagagttggaagtattccaaagacctccttgagcatctcagagtttgccaagaggaccgagctgaatccgtgaaggctgagctagctggtggctttgaggagctcaggtctttgttccttctctttctttcccttccctctagaaaagcaagtgcttgctggtcgcaggatagagctaggcacaatcatccaagactcagtccaagcattttaccacatgcagaaggacgccttgtgcccctctccaggcttgctggaggctaggaagtgtcaggcgccctctctccctaccgtttccatctctgggctctggaccaggcaggccccacctctgtgattttccacccatgggtgacttgatgctgcagctctgggcacagaggtgggcatggtgcagggtgcctgggagagaaggtgtctcaggccctgaccatgccacccttcctgcccgcagacgctggtgacatgatcgagatgcagggctttgggcccagcctgccagcctggcacctggagcccctgtgcagtcagggctcctcctgcctctcctgctcctccagcagctccccacatgcaacccccagccactgtagctgcatccccgaccggtgagtgggcagcgctcggccccagcttcccgttagcgtgtccagccacgtgtgtgtccgtctgtccttaaaggccgtgtcacctgcacgacagggtggcctctagagtgggacagatctgggttcaaatttcacttttgctacccacgtgacttacaagttatggaattaccatgagcctctacgtttctgaacctcagtttcctcatctgtaaaatggggatgatgccacttgctgcctgcagtacttatgaggacagaatgagagagaacccaagtgaaggtccggagttgtgccggcacatcatgggctcagtgcccgtgagctccccttcccgatgtgcacacagaccctgctgacaggccgtccacctgaggacactcagcagccacctgccgtgtgccagggcagtgagtgaatggcttttatgggaggtgttctcttttacctttacttcgtcttccgtttattaatcctgatgatcctccgctgcctctctccatttttcacatgaggaaacgaagattcatgtaggtgaagttcgttgaccaagatccctgggtggttgggggccaggcgggggccccacagcactctgtccaggtggcaggcagggacagggcacccactgacggctgctgggctgcggctcctcctcctcgcaccctccccagtgccttacctgccccccaggacagagcctcctcccttctctctctcctcccaccagaggggccgcagcccctccctgctgagcccggttgttgccacaggttgccgctcaggctactgtgtgagagtatgaagaggcagatcgtgtcccgggccttctacggctgtgagtgtggggcgcgccgggctgtggcgggctgggggcgggcggccctgggtcccagcctcctgctgcccaccgctgcccaccgcagggctggcacactgccgccacctgtccacggtgcggacccacctgtcggcgctggtgcaccatagcgttatcccacctgaccggcccccgggggcctccgcgggcctcaccaaggacgtgtggagcaagtatcagaaggacaaaaaggtgccaaccctggggttccagggccacaggtcgaggggctggggcgggcaggagtgagggcttcagggtaaaatgtgccagtgggtgcggttgacaggccagggccgatgccacggagtgaccagggtcccggcagaatctcttgcagctgggcctggggctgacacgggaagggggctggactgggaagccgtcctgcctccacatcgccctgtgaccctggacaaagctttgcctctctccgggcgccatttcctgccccttaaggaaggagagcagaacgagatctcatcccactgtgagctggggcacgggaggacgtggccaccccaaagcaggccttgcctgggcttcagcagtcactacaggccccgccccagcccattctccgtgggatggggctcacccagctgggccacggtgactgtggaggctgcacagtcttgactccccgggtccctcagaactacaaagagctggagctgctgcggcaagtttactacggaggcatagagcacgagatccgcaaggacgtctggccctttctgcttggccactacaagttcggcatgagcaagaaggagatggagcaggtgaggggagcctgttcccatggggctgagatggggagctgggccaggggacgccagggaggggaccttggaagcctcagccccttcccagccggaaagaagcatggcagggcagctccaccgtccttaccctgaggcccgtcttgagtctgagactcaggacccaaggtccagtgcaggcccagctcctgaaggggagggcctggtgcacgcttcccccatggtcgtggtgtggtctgagtacaggtggacgcagtggtggcagcaaggtaccagcaggtgttggcagagtggaaggcctgcgaggtggtggtgaggcagcgggagcgggaggcccacccagccacacgcaccaagttctcctcaggcagcagcatcgacagccacgtgcagcgcctcatccaccgagactccaccatcagcaacgatgtgagccagacgggacctggagggttgggggtctcgggggccacccgcgttttatgcacagtggtcctgagcaccagcctgacctctgggaactggtggggccctgcgagaaaggcctaaggtgcctgtgtctcattttctccaactggaaatggctaactgtgcctctgctgcctacttctctgggtattgtaggaataaagtgagagagtgcattgtgctcagttttagccaactatagggaaagatggacttactgggatttagggaagccctcctccttgtagaaagacctcaaagctagcaacaggcagcgctgggttctagtcccagatccactactgacaagctgaatgtctctgggcaagcacttcccgtctctgggtctcagtttcccctctccacccatatcctctgactgcagaggcttcctgagatctgtgggcctgagaataggggagcccgtagagcagccccattggtgtcgactggcgagatccttcctccccgcgatgttgcctgtcactgtacagaactgactatggcaggcttgttcggagcacgggagggtagctctttctggcatcactcctgccttttgaacagcaagttctaaactgtgactgcctggcccaaccaacactgataagtttcaattttaaggacgctttattaatttttctttaaaattgcctctttagataatgtgtattcttgttactttactaaatccttaccaacattaacagaaaatgtaagttgaagtaagttaaatataactggctgggtgtgatggctcatgcctgtaattccaacactttgggaggcagaggtgggaggattgcttcagttcaagagttcgagaccagcctgggtaacatggcgaaaccctgtctttacaaaaaatgcaaaactttgccgcatgtgttggggtgcgcctgtagtcccagcttctcgggaggctgaggtggggggaccacctgagccatggaggttgaggctgcagtgagccgtgataccaccactgtactctagcctgggccatagagtgagacaccctgcctcagaaataaaataaaaaaaaagaaatagaacaaacaaggcacattgtcatttcccacgtgctttgttcttaatcccctatccaggaacacattctccctctctctggctttgggttttgtaaaaatctgtctgtgccagtgcccagctgctgagctcatggacagcagtagctcctcgctggcgtattagatggccacagaaccgtggccttacccagcacttcatgcttcctgcccaaagtagaaactacttttagcattgctttccctacgtggtgaaaacagagagagaaaaatcccaaacagtctctgtatgtgtctcttcttttcctcgtgccttgtccatggtggtggactgtatctaggaggcagaatgtttgcttttccttcctacatctccccaccttgcctgagggctaatggaactgactaggtgcttgctacagaacgttcctgtcttgtcctgctgaacactcagtactgaaaataaggcaaaacttgtttttcctaaaacctctagccttctctccacccagccacaccaaaacactaaggccattctcccggtctcatgacttcaggcgtttctagaatgagactgagttcaaactggccattgagcgttcagccccctggctcccctacttcccttcagtagccacaggaagacctggggctgttccttcaagcagggctgaagacgtgtcttcatgtttggccagaggcttgtttctctctgcctggctggctgggtcagaagctggcttggtgctccgtggccacagtgttggaggctgtggtgggagagggggtgtgaagagttttgcattccagctcccttctggcccgaggaggcggtgggctgcgggaaggtgctggagtgcaggtggagccgccctgtgttcaccccccaggtgtttatctcagtggatgatctggaacccccggagccccaggaccctgaagattccagaccaaaacctgagcaggaagcaggacccgggactccgggcaccgccgtggtggagcagcagcattccgtggagttcgactctccagactcaggactgccctcctctcgcaattactccgtggcctcgggcatccagtcaagcctagatgaggggcagagcgtgggcttcgaagaggaggacggcggtggggaggaaggctccagtgggcccggccctgcagctcacactttgagggagccccaggatcccagccaggagaagcctcaggccggagaactggaggccggagaggagcttgcggctgtgtgtgcggctgcctacactgtgcgtacatgctccccaggctgttcccagccgccccagaggccctcctgacatcccagagctggggaagcgctggtggggtggaaggcggggcgccctgactgccctggaagggagttctgagcccatttctcagcatccccacaggactcgctctggtctctgggttccgttttgctgcatttcttggggcgtcacctcctgcccccagcctgggaagggctgcccggtctcatgcctgagggccctccactcttccagatagaattactggacactgtggccttaaacctgcaccgcatagacaaggatgtgcagaggtgtgaccgcaactactggtacttcacgccccccaacctcgagaggctcagagacgtcatgtgcaggtgccttgtggggcggggctcagggtgggaggcgggaccctgccgccagttactctgtgaagatggggtccggaaggtgccctgctcctctctcctgctcctgaatcacacttggctccccctgcctggaacgcttttttcctgcacacccctcccccgcgcctcttcattcttaggggcctaccagacctccacttcagccacacctcttcaggaagctttccctcatccccgcacccccgccccacataccaagcgtgacggccttggctctccctaagtcggagtgccttgggggggacccgtgggttgttccccgttgtctccctgtggggggtgcacagtacatgccttagggtcgtggaaaggctgacttctgggcggcaggtggctctggaggacgtcttcccagggatcccgagggagggaagaatggggcacagccacagtgactctccccctgcctttcagctacgtgtgggagcacctggacgtgggctatgtgcagggcatgtgcgatctgctggcgcctctcctggtcaccctcgacaatggtgagggatggcgggacatgggactgggctgcgtaagctggagaaaggacgagagggtggccaggtctggaggggtgggaatgggagccggctctgtcccctgcgtctcctgccctgccagcttcactcctgtctcccctcagatcagctggcctacagctgcttcagccacctcatgaagaggatgagccagaacttccccaacgggggtgccatggacacccactttgccaacatgcgctccctcatccaggtgaggccggttgccacccatgggcatgggagcaggcagtgctgggctggtccatcgtccacatggctagggagcattccacaaacatacttgacatagaaacttaacttctttcattttaaaagacatggtttcagcagggcaacgtggctcaggcctgtcatcccagcaatttaggaggccgaggcaggcggatcacgaagtcaggagtttgagaccagcctggccaacatcgtgaaaccccatctctactaaaaatacaaaaattagccgggcgtggtggcacacacctgtagtcccagctactcgggaggctgaggcaggagaatcacttgaacccgggaggtggaggttgcagtgagccgagatcacaccactgcactccagcctgggtgacagagcgagactctgtctcaaaaaaaaaaaaaaaaccatggtttcagcgttagaaattgaggaggagtgtgtgtgtgtgtgaatgctcgtgcccatgaaagttctggcgaacagtaggggttgctgatgacatcagacacccagaaaatcctataaccctaaaaataatgcagcccagagagatgggtgatgggaggggcagcaggagcaacccaccctccacaaggagatccgagggggagagagtgcaccgcgcagcacagggcaacagacagacccactgccaggttggggatcgcctgcatccctgggcgtgagcggacggtgagtggcggccagaggcagcatcggctcagggctcagcctctctcccttttcccacccacataagatcctggactcagagctgtttgagctgatgcatcagaatggagactacacccacttctacttctgttatcgctggttcctgctggattttaagagaggtaagaagtgggttggatcatggggctgaggtcagggacagtgagagatccctcttcccccaagccaacagttctcaatcctaactggaccttggaaccacctggggagctttaaaacctgccagaaccctggccccacccagcccagactcatgaactgtggctgcctgggcctatgggttcttaaatgctcgctgaccagacacagtggctcacgcctgtaaacccagcactttgggaagtcaaggtgagaggatcgcttgcacccaggatcttgagactagcctgggcaacatagcgagaccctgtctttaatttttaaaaaagaaagaaaaaatgaggctgggtgcggtggctcatgcctgtaatcccagcactttgggaggccaaggcaagcaaatcacttgaggtcaggggtttgaggccagcctggccaacatggtgaaactccgtctctactaaaaatacaaaaatcagccgggcatggtggcgggtgcctgtagtggaggcaaggttatggtgagctgagattgtgccactgcactccagcctgggcaacagagccagactgtgtctcaaaaaaaaaaaaagaaaagaaaagaaaaaattgaaaagaaaacaaaatttccataggtgattccgaagtgccactagggttgacagttacaactctcatagatcatagtttggggaacttttttcaaaccaaagcattcctgagcaccaagatgggaggcctgtgacagctgcccggctgaagtgcaggcagagtctgcaggaacccagtgtgcagaaattacccaagaaaaggatggggccttggtacggggtacagaacccccattcctgagccaggctctgtgtcatggagagaatcccacgactttggcccctgaagctctgatccctcacctggctccatttagaggcctgtgagcagccagtccggccagcatcagccccagccccagcctcagcctcagcctcagccccagcctcaatcccagcctcagcctcaatcccagcctcagccccagatatgcggctaggacgggtgagcagcagccgcttactctccgcagaactgctgtatgaggatgtgtttgctgtgtgggaggtgatctgggcagccaggcacatctcatcggagcactttgtcctgttcatcgccctcgccctggtggaggcctaccgagagatcatccgtgacaacaacatggacttcactgacatcatcaagtttttcaatggtacgagctggtccagccatccaggctgccctgagcagaggtgtggaggcccccacctctgccccgcacacagctggagggttctcaggaatcctgggggcccttccccaaaggccgggatgtcaagaatctagcagagcagatggaaacagagcagggtagtcagccacctcctagcctgctgccctttctctgggcctctctacagctcttcacgtttccccccagaacgtgctgagcatcacgatgcccaggagatcctgcggattgcccgggacctcgtccacaaggtgcagatgctcatagagaacaagtgagctggggccaggaggcagcagccgtgcagagcctgggctccggcagggagaggtgcaggggagtcaccgcccagacctccccagccaccaaccgaccccacctctgttcctaacaaagcggttgtgagcctggatccgactcccggcagtgctgaccctgcagggcaagtcaggggccaggatgccctcggatcagggccgggatgggaggggtcagcctcagggagcagctgccttgggggacacacctactctgctcccctctcacacatctgggagtagccccactgccacctgcagccgcagcctggactgctgcccacgagtgaacctggggccccacaggattaacaggggctatagcggcctgggccctactcagctggggtggcagagggcgagaggctctgtgctgtgtcccttctgagggtccctttgcagtcccagtatattgtgcgtgcaccagccccagctggagcaaccaaaactgcttctggtttaggcacacgtcacgggtgcgggagacccgggcacgggagacccgggccgccttcaggccgctcccccgagattctggggcagtcggaagatgtgggccctgggtgggagcagcccacttcagcagcactgccactgcctttggccacctgaggtgacccccaggcctccccggccttgtacagtgtacctctgtgtatctgtacagcctcgctcctgccaccccacccttgcgttctgcattaggtacttccctgaaaaccacgtgtaagaagtgatgcttttgccagtggatgatctggaatgcgaccggagcacttgctctgaggaatcccagggtgactctgtcggggaagaatccggtcacagcctcccctcagagacaggcctcagttcgagggcagcccattatctgtcgcagacatctgccatgtccctgagactgcgggaggcaggggatgcatgggtgtccccatctgtccctggtgagaagcaaggctagctctgccttccacatgcttctcaggatgccaagaggcctaggaacccagaaacccccttggaggagctgtgtatgcgggggtgccaggaagggcatagctcctgcccccaggcctaggcatgctgcttgctcggccatccccacttcctcctctaccccaacacatgcaggctaggccttgccctggaacgtggaggccctgcccggggctggggcctagtccagcagccaccaaagtctggcagactttctgcatttgagaaacatgacaaagggccccgcagcccttctgcacccagcacagcctgcccagcccagccctgcccccgggcactgcacagcctgtctgggggccagaccaccccattgtccatccttgttgtccgtgagtccttggcctccaccaagcacgtgtggccattgtgtgcctgccttagtgactccgtggttttgtgaggagcagagtgtgtatgatttttgcctcagaaactatactcttctgtgtaacagaccaataaacaacatttgtcaacactggagcctctgggactggac

SEQ ID NO: 651 - DNA, 8866 bp, Homo sapiens
  misc_feature (16): n equals a,t,g, or c
  misc_feature (35): n equals a,t,g, or c
  misc_feature (37): n equals a,t,g, or c
  misc_feature (42): n equals a,t,g, or c
  misc_feature (162): n equals a,t,g, or c
  misc_feature (253): n equals a,t,g, or c
  misc_feature (374): n equals a,t,g, or c
  misc_feature (395): n equals a,t,g, or c
  misc_feature (433): n equals a,t,g, or c
  misc_feature (482): n equals a,t,g, or c
  misc_feature (487): n equals a,t,g, or c
  misc_feature (489): n equals a,t,g, or c
  misc_feature (490): n equals a,t,g, or c
  misc_feature (500): n equals a,t,g, or c
  misc_feature (765): n equals a,t,g, or c
  misc_feature (806): n equals a,t,g, or c
  misc_feature (815): n equals a,t,g, or c
  misc_feature (825): n equals a,t,g, or c
  misc_feature (914): n equals a,t,g, or c
  misc_feature (921): n equals a,t,g, or c
  misc_feature (947): n equals a,t,g, or c
  misc_feature (1064): n equals a,t,g, or c
  misc_feature (1092): n equals a,t,g, or c
  misc_feature (1114): n equals a,t,g, or c
  misc_feature (1147): n equals a,t,g, or c
  misc_feature (1213): n equals a,t,g, or c
  misc_feature (1231): n equals a,t,g, or c
  misc_feature (1241): n equals a,t,g, or c
  misc_feature (1358): n equals a,t,g, or c
  misc_feature (1495): n equals a,t,g, or c
  misc_feature (1517): n equals a,t,g, or c
  misc_feature (1676): n equals a,t,g, or c
  misc_feature (1707): n equals a,t,g, or c
  misc_feature (1786): n equals a,t,g, or c
  misc_feature (1792): n equals a,t,g, or c
  misc_feature (1866): n equals a,t,g, or c
  misc_feature (1893): n equals a,t,g, or c
  misc_feature (2010): n equals a,t,g, or c
  misc_feature (2014): n equals a,t,g, or c
  misc_feature (2048): n equals a,t,g, or c
  misc_feature (2061): n equals a,t,g, or c
  misc_feature (2092): n equals a,t,g, or c
  misc_feature (2301): n equals a,t,g, or c
  misc_feature (2386): n equals a,t,g, or c
  misc_feature (2485): n equals a,t,g, or c
  misc_feature (2532): n equals a,t,g, or c
  misc_feature (2569): n equals a,t,g, or c
  misc_feature (2683): n equals a,t,g, or c
  misc_feature (2688): n equals a,t,g, or c
  misc_feature (2702): n equals a,t,g, or c
  misc_feature (2790): n equals a,t,g, or c
  misc_feature (2805): n equals a,t,g, or c
  misc_feature (2817): n equals a,t,g, or c
  misc_feature (2841): n equals a,t,g, or c
  misc_feature (2914): n equals a,t,g, or c
  misc_feature (2956): n equals a,t,g, or c
  misc_feature (2965): n equals a,t,g, or c
  misc_feature (3041): n equals a,t,g, or c
  misc_feature (3192): n equals a,t,g, or c
  misc_feature (3270): n equals a,t,g, or c
  misc_feature (3311): n equals a,t,g, or c
  misc_feature (3328): n equals a,t,g, or c
  misc_feature (3335): n equals a,t,g, or c
  misc_feature (3626): n equals a,t,g, or c
  misc_feature (3657): n equals a,t,g, or c
  misc_feature (3690): n equals a,t,g, or c
  misc_feature (4095): n equals a,t,g, or c
  misc_feature (4101): n equals a,t,g, or c
  misc_feature (4252): n equals a,t,g, or c
  misc_feature (4279): n equals a,t,g, or c
  misc_feature (4317): n equals a,t,g, or c
  misc_feature (4342): n equals a,t,g, or c
  misc_feature (4390): n equals a,t,g, or c
  misc_feature (4405): n equals a,t,g, or c
  misc_feature (4432): n equals a,t,g, or c
  misc_feature (4462): n equals a,t,g, or c
  misc_feature (4553): n equals a,t,g, or c
  misc_feature (4773): n equals a,t,g, or c
  misc_feature (4847): n equals a,t,g, or c
  misc_feature (4870): n equals a,t,g, or c
  misc_feature (4912): n equals a,t,g, or c
  misc_feature (4929): n equals a,t,g, or c
  misc_feature (4959): n equals a,t,g, or c
  misc_feature (5027): n equals a,t,g, or c
  misc_feature (5042): n equals a,t,g, or c
  misc_feature (5068): n equals a,t,g, or c
  misc_feature (5075): n equals a,t,g, or c
  misc_feature (5087): n equals a,t,g, or c
  misc_feature (5100): n equals a,t,g, or c
  misc_feature (5149): n equals a,t,g, or c
  misc_feature (5413): n equals a,t,g, or c
  misc_feature (5471): n equals a,t,g, or c
  misc_feature (5534): n equals a,t,g, or c
  misc_feature (5559): n equals a,t,g, or c
  misc_feature (5561): n equals a,t,g, or c
  misc_feature (5784): n equals a,t,g, or c
  misc_feature (5788): n equals a,t,g, or c
  misc_feature (5808): n equals a,t,g, or c
  misc_feature (5925): n equals a,t,g, or c
  misc_feature (5929): n equals a,t,g, or c
  misc_feature (5954): n equals a,t,g, or c
  misc_feature (5959): n equals a,t,g, or c
  misc_feature (5964): n equals a,t,g, or c
  misc_feature (5980): n equals a,t,g, or c
  misc_feature (6029): n equals a,t,g, or c
  misc_feature (6045): n equals a,t,g, or c
  misc_feature (6048): n equals a,t,g, or c
  misc_feature (6057): n equals a,t,g, or c
  misc_feature (6079): n equals a,t,g, or c
  misc_feature (6082): n equals a,t,g, or c
  misc_feature (6086): n equals a,t,g, or c
  misc_feature (6311): n equals a,t,g, or c
  misc_feature (6313): n equals a,t,g, or c
  misc_feature (6422): n equals a,t,g, or c
  misc_feature (6770): n equals a,t,g, or c
  misc_feature (6916): n equals a,t,g, or c
  misc_feature (6948): n equals a,t,g, or c
  misc_feature (6970): n equals a,t,g, or c
  misc_feature (7014): n equals a,t,g, or c
  misc_feature (7021): n equals a,t,g, or c
  misc_feature (7067): n equals a,t,g, or c
  misc_feature (7158): n equals a,t,g, or c
  misc_feature (7348): n equals a,t,g, or c
  misc_feature (7357): n equals a,t,g, or c
  misc_feature (7671): n equals a,t,g, or c
  misc_feature (7682): n equals a,t,g, or c
  misc_feature (7753): n equals a,t,g, or c
  misc_feature (7795): n equals a,t,g, or c
  misc_feature (7833): n equals a,t,g, or c
  misc_feature (7838): n equals a,t,g, or c
  misc_feature (7844): n equals a,t,g, or c
  misc_feature (7851): n equals a,t,g, or c
  misc_feature (7855): n equals a,t,g, or c
  misc_feature (8003): n equals a,t,g, or c
  misc_feature (8064): n equals a,t,g, or c
  misc_feature (8186): n equals a,t,g, or c
  misc_feature (8292): n equals a,t,g, or c
  misc_feature (8444): n equals a,t,g, or c
  misc_feature (8453): n equals a,t,g, or c
  misc_feature (8481): n equals a,t,g, or c
  misc_feature (8484): n equals a,t,g, or c
  misc_feature (8490): n equals a,t,g, or c
  misc_feature (8503): n equals a,t,g, or c
  misc_feature (8508): n equals a,t,g, or c
  misc_feature (8510): n equals a,t,g, or c
  misc_feature (8513): n equals a,t,g, or c
  misc_feature (8515): n equals a,t,g, or c
  misc_feature (8574): n equals a,t,g, or c
  misc_feature (8579): n equals a,t,g, or c
  misc_feature (8642): n equals a,t,g, or c
  misc_feature (8645): n equals a,t,g, or c
  misc_feature (8676): n equals a,t,g, or c
  misc_feature (8718): n equals a,t,g, or c
ggcacactgccgccancctgtccacggtgcggacncncaccntgtcggcgctggtgcaccatagcgttatcccacctgaccggcccccgggggcctccgcgggcctcaccaaggacgtgtggagcaagtatcagaaggacaaaaaggtgccaaccctggggnttccagggccacaggtcgaggggctggggcgggcaggagtgagggcttcagggtaaaatgtgccagtgggtgcggttgacaggccagggcncgatgccacggagtgaccagggtcccggcagaatctcttgcagctgggcctggggctgacacgggaagggggctggactgggaagccgtcctgcctccacatcgccctgtgaccctggacnaaagctttgcctctctccggngcgccatttcctgccccttaaggaaggagagcagaacngagatctcatcccactgtgagctggggcacgggaggacgtggccacccncaaangnncaggccttgncctgggcttcagcagtcactacaggccccgccccagcccattctccgtgggatggggctcacccagctgggccacggtgactgtggaggctgcacagtcttgactccccgggtccctcagaactacaaagagctggagctgctgcggcaagtttactacggaggcatagagcacgagatccgcaaggacgtctggccctttctgcttggccactacaagttcggcatgagcaagaaggagatggagcaggtgaggggagcctgtntcccatggggctgatgagatggggagctgggccaggggacngccaggganggggaccttnggaagcctcagccccttcccagccggaaagaagcatggcagggcagctccaccgtccttaccctgaggcccgtcttgagtctgagactncaggacnccaaggtccagtgcaggcccagctcnctgaaggggagggcctggtgcacgcttcccccatggtcgtggtgtggtctgagtacaggtggacgcagtggtggcagcaaggtaccagcaggtgttggcagagtggaaggcctgcgnaggtggtggtgaggcagcgggagcgggnaggcccacccagccacacgcanccaagttctcctcaggcagcagcatcgacagcncacgtgcagcgcctcatccaccgagactccaccatcagcaacgatgtgagccagacgggacctggnagggttgggggtctcggngggccacccngcgttttatgcacagtggtcctgagcaccagcctgacctctgggaactggtggggccctgcgagaaaggcctaaggtgcctgtgtctcattttctccaactggaaatggctaactgntgcctctgctgcctacttctctgggtattgtaggaataaagtgagagagtgcattgtgctcagttttagccaactatagggaaagatggacttactgggatttagggaagccctcctccttgtagaaagacctcaanagctagcaacaggcagcgctgnggttctagtcccagatccactactgacaagctgaatgtctctgggcaagcacttcccgtctctgggtctcagtttcccctctccacccatatcctctgactgcagaggcttcctgagatctgtgggcctgagaataggggagcccgtagagcagccccnattggtgtcgactggcgagatccttcctccnccgcgatgttgcctgtcactgtacagaactgactatggcaggcttgttcggagcacgggagggtagctctttctggcantcactncctgccttttgaacagcaagttctaaactgtgactgcctggcccaaccaacactgataagtttcaattttaagngacgctttattaatttttctttaaaanttgcctctttagataatgtgtattcttgttactttactaaatccttaccaacattaacagaaaatgtaagttgaagtaagttaaatataactggctgggtgtgatggctcatgcctngtanattccaacactttgggaggcagaggtgggagganttgcttcagttcnaagagtttgagaccagcctgggtaacatggncgaaaccctgtctttacaaaaaatgcaaacctttgccgcatgtgttggggtgcgcctgtagtcccagcttctcgggaggctgaggtggggggaccacctgagccatggaggttgaggctgcagtgagccgtgataccaccactgtactctagcctgggccatagagtgagacaccctgcctcagaaataaaataaaaaaaaagaaatangaacaaacaaggcacattgtcatttcccacgtgctttgttcttaatcccctatccaggaacacattctccctctctctggctttngggttttgtaaaaatctgtctgtgccagtgcccagctgctgagctcatggacagcagtagctcctcgctggcgtattagattgccacagaaccgtggcncttacccagcacttcatgcttcctgcccaaagtagaaactacttttnagcattgctttccctacgtggtgaaaacagagagagnaaaaatcccaaacagtctctgtatgtgtctcttcttttcctcgtgccttgtccatggtggtggactgtatctaggaggcagaatgtttgcttttccttcctacatctccccacncttgncctgagggctaatnggaactgactaggtgcttgctacagaacgttcctgtcttgtcctgctgaacactcagtactgaaaataaggcaaaacttgtttttccntaaaacctctaggcnttctctccaccncagccacaccaaaacactaaggcncattctcccggtctcatgacttcaggcgtttctagaatgagactgagttcaaactggccattgagcgttcagnccccctggctcccctacttcccttcagtagccacaggaagancctggggcntgttccttcaagcagggctgaagacgtgtcttcatgtttggccagaggcttgtttctctccgcctggctggctggngtcagaagctggcttggtgccccgtggccacagtgttggaggctgtggtgggagagggggtgtgaagagttttgcattccagctcccttctggcccgaggaggcggtgggctgcgggaaggtgctggagtgcaggtggagccgccctgtgnttcaccccccaggtgtttatctcagtggatgatctggaacccccggagccccaggaccctgaagattccagaccaaanacctgagcaggaagcaggacccgggactccgggcaccgccngtggtggagcagcagcnattccgntggagttcgactctccagactcaggactgccctcctctcgcaattactccgtggcctcgggcatccagtcaagcctagatgaggggcagagcgtgggcttcgaagaggaggacggcggtggggaggaaggctccagtgggcccggccctgcagctcacactttgagggagccccaggatcccagccaggagaagcctcaggccggagaactggaggccggagaggagcttgcggctgtgtgtgcggctgcctacactgtgcgtacatgctccccaggctgttcccagccgnccccagaggccctcctgacatcccagagctnggggaagcgctggtggggtggaaggcggggcgnccctgactgccctggaagggagttctgagcccatttctcagcatccccacaggactcgctctggtctctgggttccgttttgctgcatttcttggggcgtcacctcctgcccccagcctgggaagggctgcccggtctcatgcctgagggccctccactcttccagatagaattactggacactgtggccttaaacctgcaccgcatagacaaggatgtgcagaggtgtgaccgcaactactggtacttcacgccccccaacctcgagaggctcagagacgtcatgtgcaggtgccttgtggggcggggctcagggtgggaggcgggaccctgccgccagttactctgtgaagatgaggtccggaaggtgccctgctcctctctcctgctcctgaatcacacttnggctcncccctgcctggaacgcttttttcctgcacacccctcccccgcgcctcttcattcttaggggcctaccagacctccacttcagccacacctcttcaggaagctttccctcatccccgcacccccgccccacataccaagcgtgacggccttnggctctccctaagtcggagtgccttgnggggggacccgtgggttgttccccgttgtctccctgtnggggggtgcacagtacatgccttangggtcgtggaaaggctgacttctgggcggcaggtggctctggaggacngtcttcccagggatncccgagggagggaagaatggggcacangccacagtgactctccccctgcctttcagnctacgtgtgggagcacctggacgtgggctatgtgcagggcatgtgcgatctgctggcgcctctcctggtcaccctcgacaatggtgagggnatggcgggacatgggactgggctgcgtaagctggagaaaggacgagagggtggccaggtctggaggggtgggaatgggagccggctctgtcccctgcgtctcctgccctgccagcttcactcctgtctcccctcagatcagctggcctacagctgcttcagccacctcatgaagaggatgagccagaacttccccaacgggggtgccatggacacccacntttgccaacatgcgctccctcatccaggtgaggccggttgccacccatgggcatgggagcaggcagtgctgggnctggtccatcgtccacatggctnagggagcattccacaaacatacttgacatagaaacttaactntctttcattttaaaagnacatggtttcagcagggcaacgtggctcanggcctgtcatcccagcaatttaggaggccgaggcaggcggatcacgaagtcaggagtttgagaccagncctggccaacatcgntgaaaccccatctctactaaaaatancaaaaanttagccgggcgntggtggcacacancctgtagtcccagctactcgggaggctgaggcaggagaatcacttgaancccgggaggtggaggttgcagtgagccgagatcacaccactgcactccagcctgggtgacagagcgagactctgtctcaaaaaaaaaaaaaaaaaccatggtttcagcgttagaaattgaggaggagtgtgtgtgtgtgtgaatgctcgtgcccatgaaagttctggcgaacagtaggggttgctgatgacatcagacacccagaaaatcctataaccctaaaaataatgcagctcagagagatgggtgatgggaggggcagcnaggagcaacccaccctccacaaggagatccgagggggagagagtgcaccgcgcagcancagggcaacagacagacccactgccaggttggggatcgcctgcatccctgggcgtgagcggancggtgagtggcggccagaggcagcnantcggctcagggctcagcctctctcccttttcccacccacataagatcctggactcagagctgtttgagctgatgcatcagaatggagactacacccacttctacttctgttatcgctggttcctgctggattttaagagaggtaagaagtgggttggatcatggggctgaggtcagggacagtgagagatccctcttcccccaagccaacagttctcaatccntaanctggaccttggaaccacctnggggagctttaaaacctgccagaaccctggccccacccagcccagactcatgaactgtggctgcctgggcctatgggttcttaaatgctcgctgaccagacacagtggctcacgccntgtnaaacccagcactttgggaagtcaanggtgnagagngatcgcttgcacccanggatcttgagactagcctgggcaacatagcgagaccctgtctttaattntttaaaaaagaaaganaanaaatgaggnctgggtgcggtggctcatgccntgntaantcccagcactttgggaggccaaggcaagcaaatcacttgaggtcaggggtttgaggccagcctggccaacatggtgaaactccgtctctactaaaaatacaaaaatcagccgggcatggtggcgggtgcctgtagtggaggcaaggttatggtgagctgagattgtgccactgcactccagcctgggcaacagagccagactgtgtctcaaaaaaaaaaaaagananaagaaaagaaaaaattgaaaagaaaacaaaatttccataggtgattccgaagtgccactagggttgacagttacaactctcatagatcatagtttggggaacttttttncaaaccaaagcattcctgagcaccaagatgggaggcctgtgacagctgcccggctgaagtgcaggcagagtctgcaggaacccagtgtgcagaaattacccaagaaaaggatggggccttggtacggggtacagaacccccattcctgagccaggctctgtgtcatggagagaatcccacgactttggcccctgaagctctgatccctcacctggctccatttagaggcctgtgagcagccagtccggccagcatcagccccagccccagcctcagcctcagcctcagccccagcctcaatcccagcctcagcctcaatcccagcctcagccccagatatgcggctanggacgggtgagcagcagccgcttactctccgcagaactgctgtatgaggatgtgtttgctgtgtgggaggtgatctgggcagccaggcacatctcatcggagcactttgtcctgttcatcgccctcgccctggtggaggcctaccngagagatcatccgtgacaacaacatggacttncactgacatcatcaagtttttncaatggtacgagctggtccagccatccaggctgccctgagcagnaggtgtnggaggcccccacctctgccccgcacacagctggagggttctcaggnaatcctgggggcccttccccaaaggccgggatgtcaagaatctagcagagcagatggaaacagagcagggtagtcagccacctcctagccntgctgccctttctctgggcctctctacagctcttcacgtttccccccagaacgtgctgagcatcacgatgcccaggagatcctgcggattgcccgggacctcgtccacaaggtgcagatgctcatagagaacaagtgagctggggccaggaggcagcagccgtgcagagcctgggctccggcagggaganggtgcaggnggagtcaccgcccagacctccccagccaccaaccgaccccacctctgttcctaacaaagcggttgtgagcctggatccgactcccggcagtgctgaccctgcagggcaagtcaggggccaggatgccctcggatcagggccgggatgggaggggtcagcctcagggagcagctgccttgggggacacacctactctgctcccctctcacacatctgggagtagccccactgccacctgcagccgcagcctggactgctgcccacgagtgaacctggggccccacaggattaacaggggctatagcggcctgggnccctactcagnctggggtggcagagggcgagaggctctgtgctgtgtcccttctgagggtccctttgcagtcccagtatatntgtgcgtgcaccagccccagctggagcaaccaaaactgcttnctggtttaggcacacgtcacgggtgcgggagacccggngcacngggagnacccggngccngccttcaggccgctcccccgagattctggggcagtcggaagatgtgggccctgggtgggagcagcccacttcagcagcactgccactgcctttggccacctgaggtgacccccaggcctccccggccttgtacagtgtacctctgtgntatctgtacagcctcgctcctgccaccccacccttgcgttctgcattaggtacttccctgnaaaaccacgtgtaagaagtgatgcttttgccagtggatgatctggaatgcgaccggagcacttgctctgaggaatcccagggtgactctgtcggggaagaatccggtcacagcctcccctcnagagacaggcctcagttcgagggcagcccattatctgtcgcagacatctgccatgtccctgagactgcgggaggcaggggatgcatgggtgtccccatctgtcccntggtgagaagcaaggctagctctgccttccacatgcttctcaggatgccaagaggcctaggaacccagaaacccccttggaggagctgtgtatgcgggggtgccaggaagggcatagctcctgcccccaggcctaggcatgctgcttgctcnggccatccnccacttcctcctctaccccaacacatgncanggctanggccttgccctgngaacnantgngnaggccctgcccggggctggggcctagtccagcagccaccaaagtctggcagactttctngcatnttgagaaacatgacaaagggccccgcagcccttctgcacccagcacagcctgcccagcccagnccnctgcccccgggcactgcacagcctgtctggngggccagaccaccccattgtccatccttgttgtccgtgagtnccttggcctccaccaagcacgtgtggccattgtgtgcctgccttagtgactccgtggttttgtgaggagcagagtgtgtatgatttttgcctcagaaactatactcttctgtgtaacagaccaataaacaacatttgtcaacactgga

SEQ ID NO: 652 - DNA, 304 bp, Homo sapiens
agtttggcccaatcatgtagaagcttctccgccccacacacatacacactcctgtctttagagtctgtctgggcacagggcagctccctactgtctcctaccaagcccttcttttcttcctgcagggtctgtctgtggaaagtccagacagagactaagcctaaccctaaaccatgaatgaatggagggaagccctcctagcatggaaaagagaaatctctccctcagctgctgggctcatcagtccagcggccactgtcgggtccaagctctgcagtgacttcatcaatattttagctcctgc

SEQ ID NO: 653 - DNA, 120 bp, Homo sapiens
ctccaggagaattcctgagttttgctgatgacttactctctggcctgggcacatcttgtgtagcagctggtcgaagccatggagaggtccctgaagtcagtatctactcagtcatcttca

What is claimed is:

1. An isolated nucleic acid molecule comprising a polynucleotide having a nucleotide sequence at least 95% identical to a sequence selected from the group consisting of:
(a) a polynucleotide fragment of SEQ ID NO:X or a polynucleotide fragment of the cDNA sequence contained in Clone ID NO:Z, which is hybridizable to SEQ ID NO:X;
(b) a polynucleotide encoding a polypeptide fragment of SEQ ID NO:Y or a polypeptide fragment encoded by the cDNA sequence contained in CDNA Clone ID NO:Z, which is hybridizable to SEQ ID NO:X;
(c) a polynucleotide encoding a polypeptide fragment of a polypeptide encoded by SEQ ID NO:X or a polypeptide fragment encoded by the CDNA sequence contained in cDNA Clone ID NO:Z, which is hybridizable to SEQ ID NO:X;
(d) a polynucleotide encoding a polypeptide domain of SEQ ID NO:Y or a polypeptide domain encoded by the cDNA sequence contained in cDNA Clone ID NO:Z, which is hybridizable to SEQ ID NO:X;
(e) a polynucleotide encoding a polypeptide epitope of SEQ ID NO:Y or a polypeptide epitope encoded by the cDNA sequence contained in cDNA Clone ID NO:Z, which is hybridizable to SEQ ID NO:X;
(f) a polynucleotide encoding a polypeptide of SEQ ID NO:Y or the cDNA sequence contained in cDNA Clone ID NO:Z, which is hybridizable to SEQ ID NO:X, having biological activity;
(g) a polynucleotide which is a variant of SEQ ID NO:X;
(h) a polynucleotide which is an allelic variant of SEQ ID NO:X;
(i) a polynucleotide which encodes a species homologue of the SEQ ID NO:Y;
(j) a polynucleotide capable of hybridizing under stringent conditions to any one of the polynucleotides specified in (a)-(i), wherein said polynucleotide does not hybridize under stringent conditions to a nucleic acid molecule having a nucleotide sequence of only A residues or of only T residues.

2. The isolated nucleic acid molecule of claim 1, wherein the polynucleotide fragment comprises a nucleotide sequence encoding a protein.

3. The isolated nucleic acid molecule of claim 1, wherein the polynucleotide fragment comprises a nucleotide sequence encoding the sequence identified as SEQ ID NO:Y or the polypeptide encoded by the cDNA sequence contained in cDNA Clone ID NO:Z, which is hybridizable to SEQ ID NO:X.

4. The isolated nucleic acid molecule of claim 1, wherein the polynucleotide fragment comprises the entire nucleotide sequence of SEQ ID NO:X or the cDNA sequence contained in cDNA Clone ID NO:Z, which is hybridizable to SEQ ID NO:X.

5. The isolated nucleic acid molecule of claim 2, wherein the nucleotide sequence comprises sequential nucleotide deletions from either the C-terminus or the N-terminus.

6. The isolated nucleic acid molecule of claim 3, wherein the nucleotide sequence comprises sequential nucleotide deletions from either the C-terminus or the N-terminus.

7. A recombinant vector comprising the isolated nucleic acid molecule of claim 1.

8. A method of making a recombinant host cell comprising the isolated nucleic acid molecule of claim 1.

9. A recombinant host cell produced by the method of claim 8.

10. The recombinant host cell of claim 9 comprising vector sequences.

11. An isolated polypeptide comprising an amino acid sequence at least 90% identical to a sequence selected from the group consisting of:
(a) a polypeptide fragment of SEQ ID NO:Y or the encoded sequence contained in cDNA Clone ID NO:Z;
(b) a polypeptide fragment of SEQ ID NO:Y or the encoded sequence contained in cDNA Clone ID NO:Z, having biological activity;
(c) a polypeptide domain of SEQ ID NO:Y or the encoded sequence contained in cDNA Clone ID NO:Z;
(d) a polypeptide epitope of SEQ ID NO:Y or the encoded sequence contained in cDNA Clone ID NO:Z;
(e) a full length protein of SEQ ID NO:Y or the encoded sequence contained in cDNA Clone ID NO:Z;
(f) a variant of SEQ ID NO:Y;
(g) an allelic variant of SEQ ID NO:Y; or
(h) a species homologue of the SEQ ID NO:Y.

12. The isolated polypeptide of claim 11, wherein the full length protein comprises sequential amino acid deletions from either the C-terminus or the N-terminus.

13. An isolated antibody that binds specifically to the isolated polypeptide of claim 11.

14. A recombinant host cell that expresses the isolated polypeptide of claim 11.

15. A method of making an isolated polypeptide comprising:
(a) culturing the recombinant host cell of claim 14 under conditions such that said polypeptide is expressed; and
(b) recovering said polypeptide.

16. The polypeptide produced by claim 15.

17. A method for preventing, treating, or ameliorating a medical condition, comprising administering to a mammalian subject a therapeutically effective amount of the polynucleotide of claim 1.

18. A method of diagnosing a pathological condition or a susceptibility to a pathological condition in a subject comprising:
(a) determining the presence or absence of a mutation in the polynucleotide of claim 1; and
(b) diagnosing a pathological condition or a susceptibility to a pathological condition based on the presence or absence of said mutation.

19. A method of diagnosing a pathological condition or a susceptibility to a pathological condition in a subject comprising:
(a) determining the presence or amount of expression of the polypeptide of claim 11 in a biological sample; and
(b) diagnosing a pathological condition or a susceptibility to a pathological condition based on the presence or amount of expression of the polypeptide.

20. A method for identifying a binding partner to the polypeptide of claim 11 comprising:
(a) contacting the polypeptide of claim 11 with a binding partner; and
(b) determining whether the binding partner effects an activity of the polypeptide.

21. The gene corresponding to the cDNA sequence of SEQ ID NO:Y.

22. A method of identifying an activity in a biological assay, wherein the method comprises:
(a) expressing SEQ ID NO:X in a cell;
(b) isolating the supernatant;
(c) detecting an activity in a biological assay; and identifying the protein in the supernatant having the activity.

23. The product produced by the method of claim 20.

24. A method for preventing, treating, or ameliorating a medical condition, comprising administering to a mammalian subject a therapeutically effective amount of the polypeptide of claim 11.
